(19) United States
(12) Patent Application Publication
(10) Pub. No.: US 2011/0154516 A1
(43) Pub. Date: Jun. 23, 2011

(54) HUMAN FACTOR IX VARIANTS WITH AN EXTENDED HALF LIFE

(76) Inventors: Darrel W. Stafford, Carrboro, NC (US); David M. Mann, Gaithersburg, MD (US); Dengmin Feng, Carrboro, NC (US)

(21) Appl. No.: 12/734,181

(22) PCT Filed: Oct. 15, 2008
(86) PCT No.: PCT/US2008/011754

§ 371 Date: Aug. 23, 2010

Related U.S. Application Data
(60) Provisional application No. 60/999,035, filed on Oct. 15, 2007.

(51) Int. Cl. C12N 9/50; C12N 15/57; A01K 67/00

(52) U.S. Cl. 800/13; 435/219; 536/23.2; 435/325

(57) ABSTRACT

Factor IX variants are described with an increase in the number of glycosylation sites. The Factor IX variants have an increased half life and/or recovery.

### PRIORITY STATEMENT

[0001] This application claims the benefit, under 35 U.S.C. §119(e), of U.S. Provisional Application Ser. No. 60/999,035, filed Oct. 15, 2007, the entire contents of which are incorporated by reference herein in their entirety.

### BACKGROUND OF THE INVENTION

[0002] 1. Field of the Invention

[0003] The invention pertains to Factor IX variants containing additional glycosylation sites, as well as nucleic acid constructs encoding the Factor IX variants.

[0004] 2. Description of the Related Art

[0005] Factor IX is commercially available as both a plasma-derived product (Mononine®) and a recombinant protein (Benefix®). Mononine® has the disadvantage that there is a potential to transmit disease through contamination with bacteria and viruses (such as HIV, hepatitis) which are carried through the purification procedure. The use of recombinant protein (e.g., Benefix®) avoids these problems. However, the pharmacokinetic properties of recombinant Factor IX (rFactor IX, e.g., Benefix®) do not compare well with the properties of human plasma-derived Factor IX (pdFactor IX, e.g., Mononine®) after intravenous (i.v.) bolus infusion in laboratory animal model systems and in humans. Due to the less favorable pharmacokinetic properties of rFactor IX, generally 20-30% higher doses of rFactor IX are required to achieve the same procoagulant activity level as pdFactor IX (White et al. (April 1998) Seminars in Hematology vol. 35, no. 2 Suppl. 2: 33-38; Roth et al. (Dec. 15, 2001) Blood vol. 98 (13): 3600-3606).

[0006] The addition of glycosylation sites to proteins has proved to be an important tool for extending their half life. For example, darbepoetin-α is a recombinant form of erythropoietin in which two additional N-linked glycosylation sites were added (Elliott et al. “Enhancement of therapeutic protein in vivo activities through glycoengineering” Nat. Biotechnol. (2003) 21:414-421). To create darbepoetin, residues 30 and 32 were mutated to create one glycosylation site and residues 87, 88 and 90 were mutated to create the second glycosylation site. Darbepoetin with these two additional glycosylation sites had a half life three times that of normal erythropoietin; moreover, its safety was indistinguishable from EPO. No cases of antibody development against darbepoetin have been identified as of 2004 even though the molecule has five amino acid changes (Smalling et al. “Drug-induced and antibody-mediated pure red cell aplasia: a review of literature and current knowledge” Biotechnol Annu Rev. (2004) 10:237-250; Sinclair et al. “Glycoengineering: the effect of glycosylation on the properties of therapeutic protein”. J Pharm Sci. (2005) 94:1626-1635). Adding neo-glycosylation sites also extended the half life of leptin and Mpl ligand.

[0007] The present invention relates to the production of Factor IX (FIX) variants having additional glycosylation sites. The recombinant Factor IX variants have greater recovery values and/or an increased half life so that lower dosages and/or less frequent doses of Factor IX may be administered to a subject.

### SUMMARY OF THE INVENTION

[0008] The present invention provides an isolated Factor IX (FIX) protein variant comprising one or more than one additional glycosylation site as compared to wild type Factor IX. The one or more additional glycosylation sites can be introduced by insertion of additional amino acids, deletion of amino acids, substitution of amino acids and/or rearrangement of amino acids, in any combination. The one or more additional glycosylation sites can also be introduced by site-directed mutagenesis and/or by chemical synthesis of the FIX variant.

[0009] In some embodiments, at least one of the additional glycosylation sites is in the activation peptide. The FIX variant can comprise a peptide segment inserted between position N157 and N167 of the human FIX amino acid sequence of SEQ ID NO:33 and the peptide segment can comprise from about 3 to about 100 amino acid residues. The peptide segment can comprise at least part of a mouse Factor IX activation peptide (e.g., FIG. 1, line 4) and the mouse activation peptide can be modified to increase the number of glycosylation sites (e.g., FIG. 1, lines 2 and 3). The FIX protein variant of this invention can be a human FIX protein.

[0010] The one or more than one additional glycosylation sites of the variant FIX of this invention can be N-linked glycosylation site(s), O-linked glycosylation site(s) and a combination of N-linked glycosylation site(s) and O-linked glycosylation site(s).

[0011] In some embodiments, glycosylation site(s) can comprise N-linked glycosylation site(s) comprising a consensus sequence NXT/S, with the proviso that X is not proline. In other embodiments, the glycosylation site(s) comprise O-linked glycosylation site(s) comprising a consensus sequence selected from the group consisting of CXXGGT/S-C (SEQ ID NO:9), NSTE/DA (SEQ ID NO:10), NITQS (SEQ ID NO:11), QSTQS (SEQ ID NO:12), D/E-FT-R/K-V (SEQ ID NO:13), C-E/D-SN (SEQ ID NO:14), GGSC-K/R (SEQ ID NO:15) and any combination thereof. Furthermore, the FIX variant of this invention can comprise about one to about five additional glycosylation sites.

[0012] The present invention further provides a vector comprising a nucleotide sequence encoding the FIX variant of this invention, a transformed cell comprising the vector of this invention and a transgenic animal comprising the FIX variant of this invention.

[0013] In some embodiments, at least one additional glycosylation site of the FIX variant of this invention, can be outside of the activation peptide.

[0014] Furthermore, the at least one additional glycosylation site of the FIX variant of this invention can correspond to a site that is glycosylated in the native form of a non-human homolog of FIX, which non-human homolog can be, e.g., dog, pig, cow or mouse.

[0015] Additionally provided herein is a method of increasing the number of glycosylation sites in a Factor IX protein comprising: a) aligning a first FIX amino acid sequence and a second FIX amino acid sequence; b) identifying a glycosylation site in the first FIX amino acid sequence that is not present in the second FIX amino acid sequence; c) modifying the second FIX amino acid sequence to introduce a glycosylation site corresponding to the glycosylation site identified in the first FIX amino acid sequence of step (b), wherein modifying the second FIX amino acid sequence increases the number of glycosylation sites in the FIX protein.

[0016] In the methods of this invention, the first FIX amino acid sequence can be from a non-human species and the second FIX amino acid sequence can be human FIX. In further embodiments of these methods, the glycosylation site in the first FIX amino acid sequence can be in the activation peptide or outside of the activation peptide. The methods further encompass the addition of one or more glycosylation site both in the activation peptide and outside the activation peptide.

[0017] The present invention further provides an isolated FIX variant comprising one or more additional sugar chains as compared to wild type FIX. In some embodiments, the one or more additional sugar chains are added to the FIX protein by chemical and/or enzymatic methods.

[0018] Further aspects, features and advantages of this invention will become apparent from the drawings described below.

### BRIEF DESCRIPTION OF THE DRAWINGS

[0019] These and other features of this invention will now be described with reference to the following figures, which are intended to illustrate and not to limit the invention.

[0020] FIG. 1 shows human Factor IX variants. Line 1: Human Factor IX (SEQ ID NO:5); Line 2: Human FIX with mouse active peptide (AP) segment without modification of the mouse AP segment (SEQ ID NO:2); Line 3: Human FIX with mouse AP with one glycosylation site added (SEQ ID NO:3); Line 4: Human FIX with mouse AP and two glycosylation sites added (SEQ ID NO:4). The small arrow denotes the first amino acid of mature FIX (SEQ ID NO:33). The two larger arrows denote the activation peptide cleavage sites. The black stars indicate two existing glycosylation sites in the human FIX protein. The grey stars denote proposed additional glycosylation sites.

[0021] FIG. 2 shows an alignment of the amino acid sequence of human Factor IX (SEQ ID NO:5) with homologous amino acid sequences from dog (SEQ ID NO:16), pig (SEQ ID NO:17), cow (SEQ ID NO:18), and mouse (SEQ ID NO:19) (Lines 2, 3, 4 and 5, respectively). The two arrows denote the activation peptide cleavage sites. The stars indicate existing glycosylation sites in at least one of the five species shown.

[0022] FIG. 3 shows alignment of the activation peptides of several mammalian species (bovine (SEQ ID NO:20), sheep (SEQ ID NO:21), horse (SEQ ID NO:22), dog (SEQ ID NO:23), cat (SEQ ID NO:24), rat (SEQ ID NO:25), mouse (SEQ ID NO:26), human (SEQ ID NO:27), pig (SEQ ID NO:28), rabbit (SEQ ID NOS:29 & 30), and guinea pig (SEQ ID NO:31). The highly variable region is displayed as black background with white lettering. The consensus sequence shown corresponds to SEQ ID NO:32.

[0023] FIG. 4 shows a box plot of the half life of the human FIX variant containing one extra glycosylation site compared to wild-type recombinant human factor IX. The half-life of this FIX variant is increased by about 1.5 hour. Each of the box plot results represent half life determination for eight mice; the median for each box plot is represented by the solid horizontal line and the extremes of each set of mice are shown by the error bars on the graph.

[0024] FIG. 5 shows the alignment of the complete FIX amino acid sequence for cow, dog, human, mouse, platypus and opossum.

[0025] FIG. 6 shows 168 additional examples of FIX variants of this invention, wherein O-linked glycosylation site attachment sequences have been inserted into regions outside the activation peptide.

[0026] Further aspects, features and advantages of this invention will become apparent from the detailed description of the embodiments which follow.

### DETAILED DESCRIPTION OF THE INVENTION

[0027] Unless otherwise defined, all technical and scientific terms used herein have the same meaning as commonly understood by one of ordinary skill in the art to which this invention belongs. The terminology used in the description of the invention herein is for the purpose of describing particular embodiments only and is not intended to be limiting of the invention.

### Definitions

[0028] As used herein, “a,” “an” or “the” can mean one or more than one. For example, “a” cell can mean a single cell or a multiplicity of cells.

[0029] Also as used herein, “and/or” refers to and encompasses any and all possible combinations of one or more of the associated listed items, as well as the lack of combinations when interpreted in the alternative (“or”).

[0030] The term “about,” as used herein when referring to a measurable value such as an amount (e.g., an amount of methylation) and the like, is meant to encompass variations of ±20%, ±10%, ±5%, ±1%, ±0.5%, or even ±0.1% of the specified amount.

[0031] As used herein, the transitional phrase “consisting essentially of” means that the scope of a claim is to be interpreted to encompass the specified materials or steps recited in the claim, “and those that do not materially affect the basic and novel characteristic(s)” of the claimed invention. See, In re Herz, 537 F.2d 549, 551-52, 190 U.S.P.Q. 461, 463 (CCPA 1976) (emphasis in the original); see also MPEP §2111.03. Thus, the term “consisting essentially of” when used in a claim of this invention is not intended to be interpreted to be equivalent to “comprising.”

[0032] The term “pharmacokinetic properties” has its usual and customary meaning and refers to the absorption, distribution, metabolism and excretion of the Factor IX protein.

[0033] The usual and customary meaning of “bioavailability” is the fraction or amount of an administered dose of a biologically active drug that reaches the systemic circulation. In the context of embodiments of the present invention, the term “bioavailability” includes the usual and customary meaning but, in addition, is taken to have a broader meaning to include the extent to which the Factor IX protein is bioactive. In the case of Factor IX, for example, one measurement of “bioavailability” is the procoagulant activity of Factor IX protein obtained in the circulation post-infusion.

[0034] “Posttranslational modification” has its usual and customary meaning and includes but is not limited to removal of leader sequence, γ-carboxylation of glutamic acid residues, β-hydroxylation of aspartic acid residues, N-linked glycosylation of asparagine residues, O-linked glycosylation of serine and/or threonine residues, sulfation of tyrosine residues, phosphorylation of serine residues and any combination thereof.

[0035] As used herein, “biological activity” is determined with reference to a standard derived from human plasma. For Factor IX, the standard is MONONINE® (ZLB Behring). The biological activity of the standard is taken to be 100%.

[0036] The term “processing factor” is a broad term which includes any protein, peptide, non-peptide cofactor, substrate and/or nucleic acid which promotes the formation of a functional Factor IX. Examples of such processing factors include, but are not limited to, paired basic amino acid converting (or cleaving) enzyme (PACE), Vitamin K epoxide reductase (VKOR), and Vitamin K dependent γ-glutamyl carboxylase (VKGC).

[0037] The term “Factor IX protein” as used herein includes wild type Factor IX protein as well as naturally occurring or man-made variants (e.g., the T/A dimorphism in the activation peptide of human FIX at position 148 (numbering based on the mature human FIX amino acid sequence of SEQ ID NO:33, which shows a T at position 148) as described in Graham et al. (“The Malmo polymorphism of coagulation factor IX, an immunologic polymorphism due to dimorphism of residue 148 that is in linkage disequilibrium with two other F.IX polymorphisms” Am. J. Hum. Genet. 42:573-580 (1988)) Thus, a FIX protein of this invention includes a mature human FIX protein having the amino acid sequence of SEQ ID NO:33, wherein the amino acid at position 148 can be a T or an A and a subject can be either heterozygous or homozygous for either T or A at this site. A FIX protein of this invention can further include mutated forms of FIX as are known in the literature (see, e.g., Chang et al. “Changing residue 338 in human factor IX from arginine to alanine causes an increase in catalytic activity” J. Biol. Chem. 273:12089-94 (1998); Cheung et al. “Identification of the endothelial cell binding site for factor IX” PNAS USA 93:11068-73 (1996); Horst, Molecular Pathology, page 361 (458 pages) CRC Press, 1991, the entire contents of each of which are incorporated by reference herein). A FIX protein of this invention further includes any other naturally occurring human FIX variant or man made human FIX variant now known or later identified, derivatives and active fragments/active domains thereof, as are known in the art. A Factor IX protein of this invention further includes the pharmacologically active form of FIX, which is the molecule from which the activation peptide has been cleaved out of the protein by the action of proteases (or by engineering it out of the protein by removing it at the nucleic acid level), resulting in two non-contiguous polypeptide chains for FIX (light chain and heavy chain) folded as the functional FIX clotting factor. Specifically, Factor IX variants having a modification to increase the degree of glycosylation (e.g., N-linked and/or O-linked glycosylation) are specifically included in the broad term.

[0038] The term “half life” is a broad term which includes the usual and customary meaning as well as the usual and customary meaning found in the scientific literature for Factor IX. Specifically included in this definition is a measurement of a parameter associated with Factor IX which defines the time post-infusion for a decrease from an initial value measured at infusion to half the initial value. In some embodiments, the half life of FIX can be measured in blood and/or blood components using an antibody to Factor IX in a variety of immunoassays, as are well known in the art and as described herein. Alternatively, half life may be measured as a decrease in Factor IX activity using functional assays including standard clotting assays, as are well known in the art and as described herein.

[0039] The term “recovery” as used herein includes the amount of FIX, as measured by any acceptable method including but not limited to FIX antigen levels or FIX protease- or clotting-activity levels, detected in the circulation of a recipient animal or human subject at the earliest practical time of removing a biological sample (e.g., a blood or blood product sample) for the purpose of measuring the level of FIX following its infusion, injection, or delivery or administration otherwise. With current methodologies, the earliest biological sampling time for measuring FIX recovery typically falls within the first 15 minutes post infusion, injection, or delivery/administration otherwise of the FIX, but it is reasonable to expect quicker sampling times as scientific and/or clinical technologies improve. In essence, the recovery value for FIX is meant here to represent the maximum fraction of infused, injected or otherwise delivered/administered FIX that can be measured in the circulation of the recipient at the earliest possible time point following infusion, injection, or otherwise delivery to a recipient animal or patient.

[0040] The term “glycosylation site(s)” is a broad term that has its usual and customary meaning. In the context of the present application the term applies to both sites that potentially could accept a carbohydrate moiety, as well as sites within the protein, specifically FIX, on which a carbohydrate moiety has actually been attached and includes any amino acid sequence that could act as an acceptor for oligosaccharide and/or carbohydrate.

[0041] The term “isolated” can refer to a nucleic acid or polypeptide that is substantially free of cellular material, viral material, and/or culture medium (when produced by recombinant DNA techniques), or chemical precursors or other chemicals (when chemically synthesized). Moreover, an “isolated fragment” is a fragment of a nucleic acid or polypeptide that is not naturally occurring as a fragment and would not be found in the natural state.

[0042] An “isolated cell” refers to a cell that is separated from other cells and/or tissue components with which it is normally associated in its natural state. For example, an isolated cell is a cell that is part of a cell culture. An isolated cell can also be a cell that is administered to or introduced into a subject, e.g., to impart a therapeutic or otherwise beneficial effect.

[0043] Some embodiments of the invention are directed to Factor IX variants having one or more additional glycosylation sites. By “additional” or “new” glycosylation sites is meant that the number of glycosylation sites in the FIX variant is greater than the number of glycosylation sites normally present in a “wild type” form of Factor IX. A Factor IX protein of this invention can include plasma derived FIX as well as recombinant forms of FIX. Generally, embodiments of the invention are directed to increasing the number of glycosylation sites in a FIX molecule of this invention. However, it is to be understood that a Factor IX protein of this invention that can be modified to increase the number of glycosylation sites and/or to increase the number of sugar chains is not limited to a particular “wild type” FIX amino acid sequence because naturally occurring or man-made FIX variants can also be modified according to the methods of this invention to increase the number of glycosylation sites and/or to increase the number of sugar chains.

[0044] The present invention is further directed to FIX variants containing additional sugar chains. Such additional sugar side chains can be present at one or more of the additional glycosylation sites introduced into the FIX variants of this invention by the methods described herein. Alternatively, the additional sugar side chains can be present at sites on the FIX protein as a result of chemical and/or enzymatic methods to introduce such sugar chains to the FIX molecule, as are well known in the art. By “additional” or “new” sugar chains is meant that the number of sugar chains in the FIX variant is greater than the number of sugar chains normally present in a “wild type” form of Factor IX. In various embodiments, about 1 to about 500 additional sugar side chains (e.g., 1, 2, 3, 4, 5, 6, 7, 8, 9, 10, 11, 12, 13, 14, 15, 16, 17, 18, 19, 20, 21, 22, 23, 24, 25, 26, 27, 28, 29, 30, 31, 32, 33, 34, 35, 36, 37, 38, 39, 40, 41, 42, 43, 44, 45, 46, 47, 48, 49, or 50) can be added.

[0045] In some embodiments, at least one additional glycosylation site is in the activation peptide of Factor IX (e.g., the human FIX activation peptide having the amino acid sequence of SEQ ID NO:1). In particular embodiments, the FIX variant has an insertion of a peptide segment that introduces one or more glycosylation sites between position N157 and N167 of the human Factor IX amino acid sequence of SEQ ID NO:33.

[0046] Insertion(s) can be introduced into a FIX variant of this invention to increase the number of glycosylation sites and such insertion(s) can include from about one to about 100 amino acid residues, including any number of amino acid residues from one to 100 (e.g., 1, 2, 3, 4, 5, 6, 7, 8, 9, 10, 11, 12, 13, 14, 15, 16, 17, 18, 19, 20, 21, 22, 23, 24, 25, 26, 27, 28, 29, 30, 31, 32, 33, 34, 35, 36, 37, 38, 39, 40, 41, 42, 43, 44, 45, 46, 47, 48, 49, 50, 51, 52, 53, 54, 55, 56, 57, 58, 59, 60, 61, 62, 63, 64, 65, 66, 67, 68, 69, 70, 71, 72, 73, 74, 75, 76, 77, 78, 79, 80, 81, 82, 83, 84, 85, 86, 87, 88, 89, 90, 91, 92, 93, 94, 95, 96, 97, 98, 99 and 100).

[0047] In particular embodiments, the insertion includes all or at least part (e.g., at least 3, 4, 5, 6, 7, 8, 9, 10, 11, 12, 13, 14, 15 or more amino acid residues) of a Factor IX activation peptide from a non-human species, such as mouse (as shown, e.g., in line 4 of FIG. 1 and in SEQ ID NO:2). In other embodiments, the human FIX sequence is modified to include the non-human (e.g., mouse) FIX activation peptide which is modified to increase the number of glycosylation sites (as shown, e.g., in lines 2 and 3 of FIG. 1 and in SEQ ID NOs:3 and 4). In further embodiments, the human FIX amino acid sequence can be modified by insertion of an amino acid segment of the activation peptide of any non-human FIX protein, including platypus (FIG. 5). SEQ ID NO:305 provides the 14 amino acid segment that can be introduced into the activation peptide of human FIX, e.g., between amino acid residues 166 and 167 as shown in FIG. 1 for the inserted peptide segment from the mouse activation peptide or at any other site in the activation peptide. SEQ ID NO:306 provides a mature human FIX variant with the 14 amino acid sequence of platypus inserted between amino acid residues 166 and 167. This inserted peptide sequence can be further modified to introduce additional glycosylation sites according to the teachings herein. The amino acid sequence for platypus FIX as provided in FIG. 5 also indicates that at least 14 amino acids can be inserted into the activation peptide of a FIX protein with an expectation that the activity and/or function of the protein would not be adversely affected.

[0048] The glycosylation site(s) may be selected from N-linked glycosylation site(s), O-linked glycosylation site(s) and/or a combination of N-linked glycosylation site(s) and O-linked glycosylation site(s). In some embodiments, the added glycosylation site(s) include N-linked glycosylation site(s) and the consensus sequence is NXT/S, with the proviso that X is not proline.

[0049] In some embodiments about one to about 5 glycosylation site(s) can be added to the FIX amino acid sequence. In various embodiments, about 1 to about 50 glycosylation site(s) (e.g., 1, 2, 3, 4, 5, 6, 7, 8, 9, 10, 11, 12, 13, 14, 15, 16, 17, 18, 19, 20, 21, 22, 23, 24, 25, 26, 27, 28, 29, 30, 31, 32, 33, 34, 35, 36, 37, 38, 39, 40, 41, 42, 43, 44, 45, 46, 47, 48, 49, or 50) can be added. Embodiments of the invention include FIX variants in which either an N-linked or O-linked glycosylation site has been created by insertion, deletion or substitution of specific amino acids. In particular embodiments, the insertion, deletion and/or substitution is in the region of the activation peptide shown by the arrows in FIG. 1. The amino acid sequence of the human FIX activation peptide is provided herein as SEQ ID NO:1.

[0050] In some embodiments, the added glycosylation site(s) include O-linked glycosylation site(s) and the consensus sequence can be but is not limited to CXXGGT/S-C (SEQ ID NO:9), NSTE/DA (SEQ ID NO:10), NITQS (SEQ ID NO:11), QSTQS (SEQ ID NO:12), D/E-FT-R/K-V (SEQ ID NO:13), C-E/D-SN (SEQ ID NO:14), and GGSC-K/R (SEQ ID NO:15).

[0051] It is contemplated that the additional glycosylation sites introduced into a FIX amino acid sequence can be introduced anywhere throughout the amino acid sequence of the FIX protein. Thus, in some embodiments, the additional glycosylation site or sites are introduced in the activation peptide (denoted by arrows in FIG. 1; amino acids 146-180 of the mature human FIX amino acid sequence of SEQ ID NO:33), outside the activation peptide (e.g., before and/or after the activation peptide) or both inside the activation peptide and outside the activation peptide. Thus, based on the numbering of the 415 amino acids of the amino acid sequence of the mature human FIX protein as shown in SEQ ID NO:33, a glycosylation attachment site can be introduced by inserting additional amino acid residues between any of amino acids 1, 2, 3, 4, 5, 6, 7, 8, 9, 10, 11, 12, 13, 14, 15, 16, 17, 18, 19, 20, 21, 22, 23, 24, 25, 26, 27, 28, 29, 30, 31, 32, 33, 34, 35, 36, 37, 38, 39, 40, 41, 42, 43, 44, 45, 46, 47, 48, 49, 50, 51, 52, 53, 54, 55, 56, 57, 58, 59, 60, 61, 62, 63, 64, 65, 66, 67, 68, 69, 70, 71, 72, 73, 74, 75, 76, 77, 78, 79, 80, 81, 82, 83, 84, 85, 86, 87, 88, 89, 90, 91, 92, 93, 94, 95, 96, 97, 98, 99, 100, 101, 102, 103, 104, 105, 106, 107, 108, 109, 110, 111, 112, 113, 114, 115, 116, 117, 118, 119, 120, 121, 122, 123, 124, 125, 126, 127, 128, 129, 130, 131, 132, 133, 134, 135, 136, 137, 138, 139, 140, 141, 142, 143, 144, 145, 146, 147, 148, 149, 150, 151, 152, 153, 154, 155, 156, 157, 158, 159, 160, 161, 162, 163, 164, 165, 166, 167, 168, 169, 170, 171, 172, 173, 174, 175, 176, 177, 178, 179, 180, 181, 182, 183, 184, 185, 186, 187, 188, 189, 190, 191, 192, 193, 194, 195, 196, 197, 198, 199, 200, 201, 202, 203, 204, 205, 206, 207, 208, 209, 210, 211, 212, 213, 214, 215, 216, 217, 218, 219, 220, 221, 222, 223, 224, 225, 226, 227, 228, 229, 230, 231, 232, 233, 234, 235, 236, 237, 238, 239, 240, 241, 242, 243, 244, 245, 246, 247, 248, 249, 250, 251, 252, 253, 254, 255, 256, 257, 258, 259, 260, 261, 262, 263, 264, 265, 266, 267, 268, 269, 270, 271, 272, 273, 274, 275, 276, 277, 278, 279, 280, 281, 282, 283, 284, 285, 286, 287, 288, 289, 290, 291, 292, 293, 294, 295, 296, 297, 298, 299, 300, 301, 302, 303, 304, 305, 306, 307, 308, 309, 310, 311, 312, 313, 314, 315, 316, 317, 318, 319, 320, 321, 322, 323, 324, 325, 326, 327, 328, 329, 330, 331, 332, 333, 334, 335, 336, 337, 338, 339, 340, 341, 342, 343, 344, 345, 346, 347, 348, 349, 350, 351, 352, 353, 354, 355, 356, 357, 358, 359, 360, 361, 362, 363, 364, 365, 366, 367, 368, 369, 370, 371, 372, 373, 374, 375, 376, 377, 378, 379, 380, 381, 382, 383, 384, 385, 386, 387, 388, 389, 390, 391, 392, 393, 394, 395, 396, 397, 398, 399, 400, 401, 402, 403, 404, 405, 406, 407, 408, 409, 410, 411, 412, 413, 414, 415 and any combination thereof. As used herein, a “glycosylation attachment site” or “glycosylation site” can mean a sugar attachment consensus sequence (i.e., a series of amino acids that act as a consensus sequence for attaching a sugar (mono-, oligo-, or poly-saccharide) to an amino acid sequence or it can mean the actual amino acid residue to which the sugar moiety is covalently linked. The sugar moiety can be a monosaccharide (simple sugar molecule), on oligosaccharide, or a polysaccharide.

[0052] In particular embodiments, additional amino acids can be inserted between and/or substituted into any of the amino acid residues that make up the activation peptide, such as between any of amino acids 145, 146, 147, 148, 149, 150, 151, 152, 153, 154, 155, 156, 157, 158, 159, 160, 161, 162, 163, 164, 165, 166, 167, 168, 169, 170, 171, 172, 173, 174, 175, 176, 177, 178, 179, 180, 181, 182 and any combination thereof. Furthermore, the same insert of this invention can be introduced multiple times at the same and/or at different locations in the amino acid sequence of the FIX protein, including within the activation peptide. Also, different inserts and/or the same inserts can be introduced one or more times at the same and/or at different locations between amino acid residues throughout the amino acid sequence of the FIX protein, including within the activation peptide.

[0053] It is well known in the art that some proteins can support a large number of sugar side chains and the distance between O-linked glycosylation sites can be as few as every other amino acid (see, e.g., Kolset & Tveit “Serglycin—structure and biology” Cell. Mol. Life. Sci 65:1073-1085 (2008) and Kiani et al. “Structure and function of aggrecan” Cell Research 12(1):19-32 (2002)). For N-linked glycosylation sites, the distance between sites can be as few as three, four, five or six amino acids (see, e.g., Lundin et al. “Membrane topology of the Drosophila OR83b odorant receptor” FEBS Letters 581:5601-5604 (2007); Apweiler et al. “On the frequency of protein glycosylation, as deduced from analysis of the SWISS-PROT database” Biochimica et Biophysica Acta 1473:4-8 (19991), the entire contents of each of which are incorporated by reference herein).

[0054] Furthermore, the FIX protein of this invention can be modified by mutation (e.g., substitution, addition and/or deletion of amino acids) to introduce N-linked glycosylation sites, O-linked glycosylation sites or both N-linked and O-linked glycosylation sites. For example, amino acid residues on the surface of the functional FIX protein can be identified according to molecular modeling methods standard in the art that would be suitable for modification (e.g., mutation) to introduce one or more glycosylation sites. One particular example of this approach is provided in Table 2, which shows the results of molecular modeling calculations used to determine the relative surface accessibility of each amino acid in the mature human FIX protein. The solvent accessibility calculations are based on a crystallographic structure determination of the actual three dimensional structure of this FIX protein. The first column lists the amino acid name, the second column lists the sequence position for that corresponding amino acid and the column entitled “Total” shows the calculated solvent accessibility values, in relative units, for each amino acid. A higher value in the Total column means that particular amino acid is calculated to be far more exposed to the solvent (i.e., on the surface of the folded protein). For the present invention, a cut off value of greater than or equal to 60 was arbitrarily selected in order to identify amino acid residues on the surface of the FIX molecule that could be modified according to the methods of this invention to increase the number of glycosylation sites.

[0055] For example, in some embodiments, three consecutive amino acid residues having a Total value of greater than or equal to 60 can be considered for modification to introduce an additional glycosylation site and such regions are shaded in the Total column of Table 2. (The amino acid residues that make up the activation peptide are also shaded in Table 2.) However, 60 is an arbitrary cut off used as an example, and any other cut off value could be selected in order to select amino acid candidates for modification to incorporate an additional glycosylation site. Furthermore, this approach is merely one example of how amino acid residues in the FIX protein can be selected for modification and thus, the amino acid residues that can be modified to incorporate additional glycosylation sites into the mature human FIX protein are not limited to those having any particular value in the Total column of Table 2. It is within the scope of this invention and within the skill of one of ordinary skill in the art to modify any amino acid residue or residues in the mature FIX amino acid sequence according to methods well known in the art and as taught herein and to test any resulting FIX variant for activity, stability, recovery, half life, etc., according to well known methods and as described herein (see, e.g., Elliott et al. “Structural requirements for additional N-linked carbohydrate on recombinant human erythropoietin” J. Biol. Chem. 279:16854-62 (2004), the entire contents of which are incorporated by reference herein).

[0056] Embodiments of the invention are directed to recombinant Factor IX variants in which glycosylation sites have been added to improve the recovery and/or half-life and/or stability of Factor IX. The glycosylation sites may be N-linked and/or O-linked glycosylation sites. In specific embodiments, at least one N-linked glycosylation site is added. Numerous examples of human FIX variants with one or more additional N-linked glycosylation sites in the activation peptide are provided herein as SEQ ID NOs:34-91.

[0057] Numerous other examples of human FIX variants with one or more additional O-linked glycosylation sites in the activation peptide are provided herein as SEQ ID NOs:92-132. Furthermore, numerous examples of human FIX variants with one or more additional N-linked glycosylation site and one or more O-linked glycosylation site in the activation peptide are provided herein by combining the modifications made to introduce N-linked glycosylation sites as shown in SEQ ID NOs:34-91 with the modifications made to introduce the O-linked glycosylation sites as shown in SEQ ID NOs:92-132, in any combination and in any order. Such combinations can further comprise any additional modifications in the activation peptide and/or outside of the activation peptide that introduce even more glycosylation sites. Such combined modifications as described for the amino acid sequences set forth herein as SEQ ID NOs:34-132 are readily identifiable by one of ordinary skill in the art and are included among the embodiments of this invention to the same extent as if each individual amino acid sequence setting forth all such combinations were explicitly provided herein.

[0058] As noted herein, in some embodiments, at least one additional glycosylation site is introduced into the FIX amino acid sequence at a site that is outside of the activation peptide. Preferably, the at least one additional glycosylation site corresponds to a site that is glycosylated in the native form of a non-human homolog of Factor IX, as shown for example, in FIG. 2, wherein a glycosylation site is identified at amino acids 260-262 in all non-human species shown in the figure but is not naturally present in the human FIX protein. A modification of the human FIX amino acid sequence to introduce a serine or threonine at amino acid 262 of the amino acid sequence of SEQ ID NO:33, which is the mature (i.e., secreted) form of human FIX, would introduce an additional N-linked glycosylation site in the human protein. Preferably, the non-human homolog is from dog, pig, cow, or mouse.

[0059] Numerous examples of human FIX variants with one or more additional N-linked glycosylation site outside the activation peptide or human FIX variants with combinations of additional N-linked and O-linked glycosylation sites are provided herein as SEQ ID NOs:135-304. Numerous other examples of human FIX variants with one or more additional O-linked glycosylation sites outside the activation peptide are provided herein in FIG. 6. It would be readily understood that the modifications shown in FIG. 6 and in the Sequence Listing can be combined with modifications shown in any of the other examples provided herein and that the modifications shown in FIG. 6 and in the Sequence Listing are not limited to the specific N-linked or O-linked glycosylation site consensus sequences shown. Any of the N-linked and/or O-linked glycosylation site consensus sequences of this invention as well as any others known in the art are included within the embodiments of this invention and can be introduced into the FIX of this invention individually, in any combination with other O-linked glycosylation site consensus sequences and/or with any N-linked glycosylation site consensus sequences to increase the number of glycosylation sites on the FIX protein.

[0060] Additional embodiments of the invention are direct to methods of increasing the number of glycosylation sites in a Factor IX protein, comprising one or more of the following steps: a) aligning a first and a second Factor IX amino acid sequence; b) identifying one or more glycosylation sites in the first FIX amino acid sequence that are not present in the second FIX amino acid sequence; and c) altering the second FIX amino acid sequence to introduce one or more new or additional glycosylation sites in the second FIX amino acid sequence corresponding to the one or more glycosylation sites identified in the first amino acid sequence in step (b). In particular embodiments, the first amino acid sequence is Factor IX from a non-human species and the second amino acid sequence is human Factor IX. In certain embodiments, the one or more new or additional glycosylation sites are introduced into the activation peptide of the second FIX amino acid sequence. In other embodiments, the one or more new or additional glycosylation sites are introduced outside the activation peptide of the second FIX amino acid sequence and in further embodiments, the one or more new or additional glycosylation sites are introduced both in the activation peptide of the second FIX amino acid sequence and outside the activation peptide of the second FIX amino acid sequence, in any combination and at any location. In the methods of this invention, the new or additional glycosylation sites can be N-linked and/or O-linked glycosylation sites in any combination.

[0061] The methods of this invention comprise modifying the second FIX amino acid sequence within the vicinity of a corresponding region containing a glycosylation site in the first FIX amino acid sequence (e.g., within 1, 2, 3, 4, 5 or 6 amino acids), as well as modifying the second FIX amino acid sequence at the exact amino acid position(s) as those in the corresponding region in the first FIX amino acid sequence.

[0062] Additionally provided herein is a nucleic acid comprising, consisting essentially of and/or consisting of a nucleotide sequence encoding a FIX amino acid sequence of this invention. Such nucleic acids can be present in a vector, such as an expression cassette. Thus, further embodiments of the invention are directed to expression cassettes designed to express a nucleotide sequence encoding any of the Factor IX variants of this invention. The nucleic acids and/or vectors of this invention can be present in a cell. Thus, various embodiments of the invention are directed to recombinant host cells containing the vector (e.g., expression cassette). Such a cell can be isolated and/or present in a transgenic animal. Therefore, certain embodiments of the invention are further directed to a transgenic animal comprising a nucleic acid comprising a nucleotide sequence encoding any of the Factor IX variants of the present invention.

[0063] A comparison of the amino acid sequence of the activation peptide of human, mouse, guinea pig and platypus FIX reveals that the mouse FIX amino acid sequence has an additional nine amino acids present in its activation peptide, the guinea pig FIX amino acid sequence has an additional ten amino acid residues present in its activation peptide and the platypus has an additional 14 amino acid residues present in its activation peptide (FIG. 5). These extra amino acids are between the two naturally occurring glycosylation sites (N 157 and N 167) in human Factor IX.

[0064] The human and mouse FIX have essentially identical structures and the human enzyme can function in the mouse. As the human FIX functions without the additional nine amino acid segment found in the mouse, this region of the Factor IX molecule can tolerate modifications within its sequence, including insertions, substitutions and/or deletions, without substantial loss in structural, biochemical, or otherwise functional integrity of the molecule. The inserted nine amino acids in mouse are most likely surface residues (as supported by structural studies) and therefore accessible for modification by the glycosylation enzymes. In native human factor IX, the two N-linked glycosylation sites are 12 and 14 amino acids distant from the amino and carboxyl cleavage sites, respectively, of the activation peptide. Thus, in some embodiments of the invention, additional amino acid residues can be added between N157 and N167 of the human Factor IX protein in order to add glycosylation sites to improve half life and/or bioavailability. In various embodiments, glycosylation sites are added by insertion, deletion and/or modification of the native sequence to include an attachment sequence for O-linked glycosylation and/or consensus sequences for N-linked glycosylation.

[0065] The human sequence for the activation peptide starts at residue 146 of the mature protein. The natural glycosylation sites are at N157 and N167 (SEQ ID NO:33). In some embodiments, additional amino acid residues can be inserted between the two normal glycosylation sites (between N157 and N167 in the human sequence) to provide additional glycosylation sites. In some embodiments, about 3 to about 100 additional amino acid residues are added. In other embodiments, about 5 to about 50 amino acid residues are added. In further embodiments, about 5 to about 20 amino acid residues are added. In yet further embodiments, about 7 to about 15 amino acid residues are added. Typically, the amino acid residues are chosen from the 20 biological amino acids with the proviso that proline is not used as “X” in the glycosylation site NXT/S, which is the consensus sequence for N-linked glycosylation. Table 1 shows 20 common biological amino acids and their abbreviations.

[0066] N-glycosylation sites and/or O-glycosylation sites may be added. Consensus sequences for addition of glycosylation sites are known in the art and include the consensus sequence “NXT/S” for N-glycosylation where X is not proline. O-glycosylation sites are more varied and generally do not have a “consensus sequence” for attachment. In preferred embodiments, additional O-linked glycosylation sites for Factor IX are introduced by insertion, deletion and/or modification of the native sequence to include consensus sequences for O-linked glycosylation found in other clotting proteins such as Factor II, Factor VII, Factor VIII, Factor X, Protein C, and Protein S. For example, the sequence CXXGGT/S-C (SEQ ID NO:9) is found in several clotting factors and hemostatic proteins as a consensus sequence for attaching an O-linked oligosaccharide (van den Steen et al. In Critical Reviews in Biochemistry and Molecular Biology, Michael Cox, ed., 33(3):151-208 (1998)). In some embodiments, the glycosylation site(s) include O-linked glycosylation site(s) including but not limited to:

| | |
|---|---|
| CXXGGT/S-C | (SEQ ID NO: 9) |
| NSTE/DA | (SEQ ID NO: 10) |
| NITQS | (SEQ ID NO: 11) |
| QSTQS | (SEQ ID NO: 12) |
| D/E-FT-R/K-V | (SEQ ID NO: 13) |
| C-E/D-SN | (SEQ ID NO: 14) |
| GGSC-K/R | (SEQ ID NO: 15) |

[0067] In the sequences above, the attachment point for glycosylation is underlined. In some embodiments, the FIX variant is prepared by insertion of the S/T residue for O-linked glycosylation with a residue on either side such as the following trimers: G-T/S-C, ST-E/D, ITQ, STQ, FT-R/K, E/D-SN and GSC. Other variations include the interchangeability of S and T for the actual glycosylation site. S may be substituted for T and T may be substituted for S. Embodiments of the invention are directed to the addition, by insertion, deletion and/or substitution, of any sequence thought to be a signal for either N-linked or O-linked glycosylation.

[0068] In some embodiments, endogenous N-linked and O-linked attachment sequences from mouse, human and other mammalian Factor IX sequences are inserted into the activation peptide. These may be inserted individually or in combination. In certain embodiments, the inserted segment includes a spacer region between glycosylation sites, which can be present individually, in tandem repeats, in multiples, etc. A spacer region of this invention can be from one to about 100 amino acids in length (e.g., 1, 2, 3, 4, 5, 6, 7, 8, 9, 10, 11, 12, 13, 14, 15, 16, 17, 18, 19, 20, 21, 22, 23, 24, 25, 26, 27, 28, 29, 30, 31, 32, 33, 34, 35, 36, 37, 38, 39, 40, 41, 42, 43, 44, 45, 46, 47, 48, 49, 50, 51, 52, 53, 54, 55, 56, 57, 58, 59, 60, 61, 62, 63, 64, 65, 66, 67, 68, 69, 70, 71, 72, 73, 74, 75, 76, 77, 78, 79, 80, 81, 82, 83, 84, 85, 86, 87, 88, 89, 90, 91, 92, 93, 94, 95, 96, 97, 98, 99 and 100). In some embodiments, for example, the spacer region can be from one to about 20 amino acids. In other embodiments the spacer region can be from one to about ten amino acids. In further embodiments, the spacer region can be from one to about five amino acid residues.

[0069] A spacer region of this invention is included between the added carbohydrate attachment sites and/or between naturally occurring glycosylation sites and added glycosylation sites to reduce or eliminate steric hindrance and provide efficient recognition by the appropriate glycosyltransferase. A spacer region of this invention can be comprised of any combination of amino acid residues provided that they are not cysteine or proline and provided that the amino acid sequence of the spacer does not have more than about 10% residues that are hydrophobic (e.g., tryptophan, tyrosine, phenylalanine and valine).

[0070] In some embodiments, NXT/S is incorporated into the inserted amino acid sequence to add one or more additional glycosylation sites. “X” may be any biological amino acid except that proline is disfavored. In some embodiments, at least one additional glycosylation site is added to the Factor IX variant. In other embodiments, two additional glycosylation sites are added. In further embodiments, three additional glycosylation sites are added. In yet further embodiments, four additional glycosylation sites are added. In further embodiments, five additional glycosylation sites are added. In some embodiments, six additional glycosylation sites are added. In other embodiments, more than six additional glycosylation sites are added.

[0071] In one embodiment, Ala at position 161 of the mature human FIX amino acid sequence (SEQ ID NO:33) is replaced with Asn to provide one additional glycosylation site. In another embodiment, a peptide segment from the mouse activation peptide is inserted into the human FIX activation peptide with modification of the mouse sequence to create one additional glycosylation site (FIG. 1, line 3; SEQ ID NO:3) or two additional glycosylation sites (SEQ ID NO:4; FIG. 1, line 2). In a further embodiment, the sequence VFIQDNITD (SEQ ID NO:6) is inserted between residues 161 and 162 of the mature human FIX amino acid sequence of SEQ ID NO:33 to introduce an N-linked glycosylation site in the human FIX sequence. In yet a further embodiment, another new glycosylation site is added by replacing Asp with Asn in the VFIQDNITD insert. The inserted sequence would give VFIQDNITN (SEQ ID NO:7). The embodiments discussed above could be combined to provide one to four additional glycosylation sites in the human Factor IX protein.

[0072] In another embodiment, the following sequence is added, which provides five additional glycosylation sites. The glycosylation sites are shown in bold and underlined.

(SEQ ID NO: 8)
AETVFPDVDYVNSTENETIQDNITDNETILDNITQSTQSFNDFTR

[0073] In some embodiments, glycosylation sites are added at sites outside of the activation peptide. These additional sites can be selected, for example, by aligning the amino acid sequence of Factor IX from human with the Factor IX amino acid sequence from other species and determining the position of glycosylation sites in non-human species. The homologous or equivalent position in the human FIX amino acid sequence is then modified to provide a glycosylation site. This method may be used to identify both potential N-glycosylation and O-glycosylation sites.

[0074] An example of this approach is provided in FIG. 2, in which the human FIX amino acid sequence (SEQ ID NO:1) is aligned with the FIX amino acid sequence from dog, pig, cow and mouse, respectively. At the position of the fifth star, there is a glycosylation site in all species shown except human, indicating that glycosylation is well tolerated at this position. The dog, pig, cow and mouse FIX amino acid sequences have the consensus sequence for N-glycosylation at this site (NXT/S), but the human FIX amino acid sequence does not. Instead the human FIX amino acid sequence is NAA. Mutation of the human FIX amino acid sequence at amino acid 262 to produce the consensus sequence NAT/S will introduce an additional glycosylation site at this position in the human FIX protein.

[0075] The FIX variants according to the invention are produced and characterized by methods well known in the art and as described in the EXAMPLE section provided herein. These methods include determination of clotting time (partial thromboplastin time (PPT) assay) and administration of the FIX variant to a test animal to determine recovery, half life, and bioavailability by an appropriate immunoassay and/or activity-assay, as are well known in the art.

[0076] In some embodiments, a recombinant Factor IX protein is produced by one or more of the method steps described herein. The recombinant Factor IX protein produced by the methods described can be included in a pharmaceutical composition. Some embodiments are directed to a kit which includes the recombinant Factor IX protein produced according to the methods described herein. The recombinant Factor IX protein can be used in a method of treating bleeding disorders by administering an effective amount of the recombinant Factor IX protein to a subject (e.g., a human patient) in need thereof.

[0077] Many expression vectors can be used to create genetically engineered cells. Some expression vectors are designed to express large quantities of recombinant proteins after amplification of transfected cells under a variety of conditions that favor selected, high expressing cells. Some expression vectors are designed to express large quantities of recombinant proteins without the need for amplification under selection pressure. The present invention includes the production of genetically engineered cells according to methods standard in the art and is not dependent on the use of any specific expression vector or expression system.

[0078] To create a genetically engineered cell to produce large quantities of a Factor IX protein, cells are transfected with an expression vector that contains the cDNA encoding the protein. In some embodiments, the target protein is expressed with selected co-transfected enzymes that cause proper post-translational modification of the target protein to occur in a given cell system.

[0079] The cell may be selected from a variety of sources, but is otherwise a cell that may be transfected with an expression vector containing a nucleic acid, preferably a cDNA encoding a Factor IX protein.

[0080] The practice of the present invention employs, unless otherwise indicated, conventional techniques of molecular biology, microbiology, recombinant DNA, and immunology, which are within the skill of the art. Such techniques are explained fully in the literature. See, e.g., Sambrook, et al., Molecular Cloning; A Laboratory Manual, 2nd ed. (1989); DNA Cloning, Vols. I and II (D. N Glover, ed. 1985); Oligonucleotide Synthesis (M. J. Gait, ed. 1984); Nucleic Acid Hybridization (B. D. Hames & S. J. Higgins, eds. 1984); Transcription and Translation (B. D. Hames & S. J. Higgins, eds. 1984); Animal Cell Culture (R. I. Freshney, ed. 1986); Immobilized Cells and Enzymes (IRL Press, 1986); B. Perbal, A Practical Guide to Molecular Cloning (1984); the series, Methods in Enzymology (Academic Press, Inc.), particularly Vols. 154 and 155 (Wu and Grossman, and Wu, eds., respectively); Gene Transfer Vectors for Mammalian Cells (J. H. Miller and M. P. Calos, eds. 1987, Cold Spring Harbor Laboratory); Immunochemical Methods in Cell and Molecular Biology, Mayer and Walker, eds. (Academic Press, London, 1987); Scopes, Protein Purification: Principles and Practice, 2nd ed. 1987 (Springer-Verlag, N.Y.); and Handbook of Experimental Immunology Vols I-IV (D. M. Weir and C. C. Blackwell, eds 1986). All patents, patent applications, and publications cited in the specification are incorporated herein by reference in their entireties.

### Genetic Engineering Techniques

[0081] The production of cloned genes, recombinant DNA, vectors, transformed host cells, proteins and protein fragments by genetic engineering is well known. See, e.g., U.S. Pat. No. 4,761,371 to Bell et al. at Col. 6, line 3 to Col. 9, line 65; U.S. Pat. No. 4,877,729 to Clark et al. at Col. 4, line 38 to Col. 7, line 6; U.S. Pat. No. 4,912,038 to Schilling at Col. 3, line 26 to Col. 14, line 12; and U.S. Pat. No. 4,879,224 to Wallner at Col. 6, line 8 to Col. 8, line 59.

[0082] A vector is a replicable DNA construct. Vectors are used herein either to amplify nucleic acid encoding Factor IX Protein and/or to express nucleic acid which encodes Factor IX Protein. An expression vector is a replicable nucleic acid construct in which a nucleotide sequence encoding a Factor IX protein is operably linked to suitable control sequences capable of effecting the expression the nucleotide sequence to produce a Factor IX protein in a suitable host. The need for such control sequences will vary depending upon the host selected and the transformation method chosen. Generally, control sequences include a transcriptional promoter, an optional operator sequence to control transcription, a sequence encoding suitable mRNA ribosomal binding sites, and sequences that control the termination of transcription and translation.

[0083] Vectors comprise plasmids, viruses (e.g., adenovirus, cytomegalovirus), phage, and integratable DNA fragments (i.e., fragments integratable into the host genome by recombination). The vector replicates and functions independently of the host genome, or may, in some instances, integrate into the genome itself. Expression vectors can contain a promoter and RNA binding sites that are operably linked to the gene to be expressed and are operable in the host organism.

[0084] DNA regions or nucleotide sequences are operably linked or operably associated when they are functionally related to each other. For example, a promoter is operably linked to a coding sequence if it controls the transcription of the sequence; or a ribosome binding site is operably linked to a coding sequence if it is positioned so as to permit translation of the sequence.

[0085] Transformed host cells are cells which have been transformed, transduced and/or transfected with Factor IX protein vector(s) constructed using recombinant DNA techniques.

[0086] Suitable host cells include prokaryote, yeast or higher eukaryotic cells such as mammalian cells and insect cells. Cells derived from multicellular organisms are a particularly suitable host for recombinant Factor IX protein synthesis, and mammalian cells are particularly preferred. Propagation of such cells in cell culture has become a routine procedure (Tissue Culture, Academic Press, Kruse and Patterson, editors (1973)). Examples of useful host cell lines are VERO and HeLa cells, Chinese hamster ovary (CHO) cell lines, and WI138, HEK 293, BHK, COS-7, CV, and MDCK cell lines. Expression vectors for such cells ordinarily include (if necessary) an origin of replication, a promoter located upstream from the nucleotide sequence encoding Factor IX protein to be expressed and operatively associated therewith, along with a ribosome binding site, an RNA splice site (if intron-containing genomic DNA is used), a polyadenylation site, and a transcriptional termination sequence. In a preferred embodiment, expression is carried out in Chinese Hamster Ovary (CHO) cells using the expression system of U.S. Pat. No. 5,888,809, which is incorporated herein by reference in its entirety.

[0087] The transcriptional and translational control sequences in expression vectors to be used in transforming vertebrate cells are often provided by viral sources. For example, commonly used promoters are derived from polyoma, Adenovirus 2, and Simian Virus 40 (SV40). See. e.g., U.S. Pat. No. 4,599,308.

[0088] An origin of replication may be provided either by construction of the vector to include an exogenous origin, such as may be derived from SV 40 or other viral (e.g., polyoma, adenovirus, VSV, or BPV) source, or may be provided by the host cell chromosomal replication mechanism. If the vector is integrated into the host cell chromosome, the latter is often sufficient.

[0089] Rather than using vectors which contain viral origins of replication, one can transform mammalian cells by the method of cotransformation with a selectable marker and the nucleic acid encoding the Factor IX protein. Examples of suitable selectable markers are dihydrofolate reductase (DHFR) or thymidine kinase. This method is further described in U.S. Pat. No. 4,399,216 which is incorporated by reference herein in its entirety.

[0090] Other methods suitable for adaptation to the synthesis of Factor IX protein in recombinant vertebrate cell culture include those described in Gething et al. Nature 293:620 (1981); Mantei et al. Nature 281:40; and Levinson et al., EPO Application Nos. 117,060A and 117,058A, the entire contents of each of which are incorporated herein by reference.

[0091] Host cells such as insect cells (e.g., cultured Spodoptera frugiperda cells) and expression vectors such as the baculovirus expression vector (e.g., vectors derived from Autographa californica MNPV, Trichoplusia ni MNPV, Rachiplusia ou MNPV, or Galleria ou MNPV) may be employed in carrying out the present invention, as described in U.S. Pat. Nos. 4,745,051 and 4,879,236 to Smith et al. In general, a baculovirus expression vector comprises a baculovirus genome containing the nucleotide sequence to be expressed inserted into the polyhedrin gene at a position ranging from the polyhedrin transcriptional start signal to the ATG start site and under the transcriptional control of a baculovirus polyhedrin promoter.

[0092] Prokaryote host cells include gram negative or gram positive organisms, for example Escherichia coli (E. coli) or bacilli. Higher eukaryotic cells include established cell lines of mammalian origin as described below. Exemplary host cells are E. coli W3110 (ATCC 27,325), E. coli B, E. coli X1776 (ATCC 31,537) and E. coli 294 (ATCC 31,446). A broad variety of suitable prokaryotic and microbial vectors are available. E. coli is typically transformed using pBR322. Promoters most commonly used in recombinant microbial expression vectors include the betalactamase (penicillinase) and lactose promoter systems (Chang et al. Nature 275:615 (1978); and Goeddel et al. Nature 281:544 (1979)), a tryptophan (trp) promoter system (Goeddel et al. Nucleic Acids Res. 8:4057 (1980) and EPO App. Publ. No. 36,776) and the tac promoter (De Boer et al. Proc. Natl. Acad. Sci. USA 80:21 (1983)). The promoter and Shine-Dalgarno sequence (for prokaryotic host expression) are operably linked to the nucleic acid encoding the Factor IX protein, i.e., they are positioned so as to promote transcription of Factor IX messenger RNA from DNA.

[0093] Eukaryotic microbes such as yeast cultures may also be transformed with protein-encoding vectors (see, e.g., U.S. Pat. No. 4,745,057). Saccharomyces cerevisiae is the most commonly used among lower eukaryotic host microorganisms, although a number of other strains are commonly available. Yeast vectors may contain an origin of replication from the 2 micron yeast plasmid or an autonomously replicating sequence (ARS), a promoter, nucleic acid encoding Factor IX protein, sequences for polyadenylation and transcription termination, and a selection gene. An exemplary plasmid is YRp7, (Stinchcomb et al. Nature 282:39 (1979); Kingsman et al. Gene 7:141 (1979); Tschemper et al. Gene 10:157 (1980)). Suitable promoting sequences in yeast vectors include the promoters for metallothionein, 3-phosphoglycerate kinase (Hitzeman et al. J. Biol. Chem. 255:2073 (1980) or other glycolytic enzymes (Hess et al. J. Adv. Enzyme Reg. 7:149 (1968); and Holland et al. Biochemistry 17:4900 (1978)). Suitable vectors and promoters for use in yeast expression are further described in R. Hitzeman et al., EPO Publn. No. 73,657.

[0094] Cloned coding sequences of the present invention may encode FIX of any species of origin, including mouse, rat, dog, opossum, rabbit, cat, pig, horse, sheep, cow, guinea pig, opossum, platypus, and human, but preferably encode Factor IX protein of human origin. Nucleic acid encoding Factor IX that is hybridizable with nucleic acid encoding proteins disclosed herein is also encompassed. Hybridization of such sequences may be carried out under conditions of reduced stringency or even stringent conditions (e.g., stringent conditions as represented by a wash stringency of 0.3M NaCl, 0.03M sodium citrate, 0.1% SDS at 60° C. or even 70° C.) to nucleic acid encoding Factor IX protein disclosed herein in a standard in situ hybridization assay. See, e.g., Sambrook et al., Molecular Cloning, A Laboratory Manual (2d Ed. 1989) Cold Spring Harbor Laboratory).

[0095] The FIX variants produced according to the invention may be expressed in transgenic animals by known methods. See for Example U.S. Pat. No. 6,344,596, which is incorporated herein by reference in its entirety. In brief, transgenic animals may include but are not limited to farm animals (e.g., pigs, goats, sheep, cows, horses, rabbits and the like) rodents (such as mice, rats and guinea pigs), and domestic pets (for example, cats and dogs). Livestock animals such as pigs, sheep, goats and cows, are particularly preferred in some embodiments.

[0096] The transgenic animal of this invention is produced by introducing into a single cell embryo an appropriate polynucleotide that encodes a human Factor IX variant of this invention in a manner such that the polynucleotide is stably integrated into the DNA of germ line cells of the mature animal, and is inherited in normal Mendelian fashion. The transgenic animal of this invention would have a phenotype of producing the FIX variant in body fluids and/or tissues. The FIX variant would be removed from these fluids and/or tissues and processed, for example for therapeutic use. (See, e.g., Clark et al. “Expression of human anti-hemophilic factor IX in the milk of transgenic sheep” Bio/Technology 7:487-492 (1989); Van Cott et al. “Haemophilic factors produced by transgenic livestock: abundance can enable alternative therapies worldwide” Haemophilia 10(4):70-77 (2004), the entire contents of which are incorporated by reference herein).

[0097] DNA molecules can be introduced into embryos by a variety of means including but not limited to microinjection, calcium phosphate mediated precipitation, liposome fusion, or retroviral infection of totipotent or pluripotent stem cells. The transformed cells can then be introduced into embryos and incorporated therein to form transgenic animals. Methods of making transgenic animals are described, for example, in Transgenic Animal Generation and Use by L. M. Houdebine, Harwood Academic Press, 1997. Transgenic animals also can be generated using methods of nuclear transfer or cloning using embryonic or adult cell lines as described for example in Campbell et al., Nature 380:64-66 (1996) and Wilmut et al., Nature 385:810-813 (1997). Further a technique utilizing cytoplasmic injection of DNA can be used as described in U.S. Pat. No. 5,523,222.

[0098] Factor IX-producing transgenic animals can be obtained by introducing a chimeric construct comprising Factor IX-encoding sequences. Methods for obtaining transgenic animals are well-known. See, for example, Hogan et al., MANIPULATING THE MOUSE EMBRYO, (Cold Spring Harbor Press 1986); Krimpenfort et al., Bio/Technology 9:88 (1991); Palmiter et al., Cell 41:343 (1985), Kraemer et al., GENETIC MANIPULATION OF THE EARLY MAMMALIAN EMBRYO, (Cold Spring Harbor Laboratory Press 1985); Hammer et al., Nature 315:680 (1985); Wagner et al., U.S. Pat. No. 5,175,385; Krimpenfort et al., U.S. Pat. No. 5,175,384, Janne et al., Ann. Med. 24:273 (1992), Brem et al., Chim. Oggi. 11:21 (1993), Clark et al., U.S. Pat. No. 5,476,995, all incorporated by reference herein in their entireties.

[0099] In some embodiments, cis-acting regulatory regions may be used that are “active” in mammary tissue in that the promoters are more active in mammary tissue than in other tissues under physiological conditions where milk is synthesized. Such promoters include but are not limited to the short and long whey acidic protein (WAP), short and long α, β and κ casein, α-lactalbumin and β-lactoglobulin (“BLG”) promoters. Signal sequences can also be used in accordance with this invention that direct the secretion of expressed proteins into other body fluids, particularly blood and urine. Examples of such sequences include the signal peptides of secreted coagulation factors including signal peptides of Factor IX, protein C, and tissue-type plasminogen activator.

[0100] Among the useful sequences that regulate transcription, in addition to the promoters discussed above, are enhancers, splice signals, transcription termination signals, polyadenylation sites, buffering sequences, RNA processing sequences and other sequences which regulate the expression of transgenes.

[0101] Preferably, the expression system or construct includes a 3′ untranslated region downstream of the nucleotide sequence encoding the desired recombinant protein. This region can increase expression of the transgene. Among the 3′ untranslated regions useful in this regard are sequences that provide a poly A signal.

[0102] Suitable heterologous 3′-untranslated sequences can be derived, for example, from the SV40 small t antigen, the casein 3′ untranslated region, or other 3′ untranslated sequences well known in this art. Ribosome binding sites are also important in increasing the efficiency of expression of FIX. Likewise, sequences that regulate the post-translational modification of FIX are useful in the invention.

[0103] Factor IX coding sequences, along with vectors and host cells for the expression thereof, are disclosed in European Patent App. 373012, European Patent App. 251874, PCT Patent Appl. 8505376, PCT Patent Appln. 8505125, European Patent Appln. 162782, and PCT Patent Appln. 8400560, all of which are incorporated by reference herein in their entireties.

[0104] Variants in FIX proteins having additional glycosylation sites may be produced by recombinant methods such as site-directed mutagenesis using PCR. Alternatively, the Factor IX variant may be chemically synthesized to prepare a Factor IX protein with one or more additional glycosylation sites.

### EXAMPLES

### Example 1

### Addition of One Glycosylation Site into Human FIX Amino Acid Sequence

[0105] A variant of human FIX having one additional glycosylation site in the activation peptide was produced in CHO cells. This variant is stable, has normal activity and an increased half life as compared with wild type recombinant human FIX.

[0106] Vectors. FIX-pDEF38 CHEF-1 promoter-containing vector from ICOS was used to express nucleic acid encoding wild type recombinant human FIX or a variant of recombinant human FIX.

[0107] Variant FIX. The variant human FIX prepared for these experiments comprises nine extra amino acids containing one extra glycosylation site inserted into the activation peptide (SEQ ID NO:3; FIG. 1, line 3). The sequence of the activation peptide of this variant with the nine added amino acids bolded is AETVFPDVDYVNSTEAETILDNITDGAILNNITQSTQSFNDFTR (SEQ ID NO:133), which shows amino acid 146 at the N terminus and amino acid 181 at the C terminus, with numbering based on the mature human FIX amino acid sequence of SEQ ID NO:33.

[0108] Transfection of CHO DG44 cells. Cells are seeded at a density of 3×10⁵ cells/mL in a 125 mL shaker flask containing 15 mL of growth medium and incubated at 37° C. On day 3, cell density should be ˜1×10⁶ cells/mL. DNA-LIPOFECTAMINE 2000 CD complexes are prepared by diluting 20 ug of DNA into 650 ul of OPTIPRO SFM, mixing gently and incubating for 5 minutes at room temperature (RT). LIPOFECTAMINE 2000 CD is mixed gently before use and diluted by putting 45 ul in 650 ul of OPTIPRO SFM, mixing gently and incubating at RT for 5 minutes. After the incubation, the diluted DNA and diluted LIPOFECTAMINE 2000 CD are combined, mixed gently and incubated for 30-45 minutes at RT to allow the DNA-LIPOFECTAMINE 2000 CD complexes to form. After incubation, DNA-LIPOFECTAMINE 2000 CD complexes are added into the shaker flask. After 48 hrs, the cells are spun down and the medium is changed with 30 ml CD OptiCHO™ Medium (Invitrogen. Cat. 12681-011). The medium is changed every 2-3 days to obtain stably transfected cells.

[0109] Selection of FIX-expressing cells. Because the dhfr gene is inactivated in DG44 cells, the dhfr gene (Egrie J C, Browne J K. “Development and characterization of novel erythropoiesis stimulating protein (NESP)” Nephrol Dial Transplant. 2001; 16 Suppl 3:3-13) was used as a selection marker. The stably expressing dhfr positive DG44 cells do not require HT for cell growth and can be grown in CD CHO medium.

[0110] Purification of hFIX variant proteins from media collected from mixed CHO DG44 cell transfectants and 293 cell clones¹. The purification of rhFIX variant proteins was as follows. EDTA (200 mM, pH 7.4) and benzamidine (1M solution) were added to the crude culture medium to a final concentration of 4 mM and 5 mM, respectively. The culture medium containing the rhFIX variant proteins was mixed with a Q sepharose anion exchange resin at 4° C. The Q sepharose resin was pre-equilibrated with 20 mM Tris, pH 7.4, 0.15M NaCl, 2 mM EDTA, 2 mM benzamidine. The column was washed with 1 L equilibrating buffer and then washed with 200 ml equilibrating buffer without the EDTA. The rhFIX variant protein was eluted with 20 mM Tris, pH 7.4, 0.15M NaCl, 10 mM CaCl₂.

[0111] FIX activity. Functional activity of the variant recombinant human FIX was determined by incubating 100 μl human FIX-deficient plasma with 100 μl automated activated partial thromboplastin time (aPTT) reagent (Trinity biotech USA), and 20 μl of test sample diluted with 80 μl Owren-Koller buffer for 3 min at 37° C. To start the reaction, 100 μl of 25 mM CaCl₂ was added, and time to clot formation was measured by eye. The clotting activity of normal pooled human plasma was deemed 100%. FIX-specific activity was calculated by dividing the clotting activity by the total amount of FIX protein as determined by immunoassay and is expressed as units per milligram. The specific activity 116 units per mg for wild type FIX and 104 units per mg for FIX with one extra glycosylation site.

[0112] FIX size. An obvious increase in the size of the purified FIX with one extra glycosylation site, as compared to purified plasma FIX and purified wild type recombinant FIX made in CHO cells, was detected by polyacrylamide gel electrophoresis. Upon enzymatic removal of the sugars, the variant FIX migrates approximately with the similarly treated wild type recombinant FIX.

[0113] Half life. The half life measurement was done by injecting eight hemophilia B mice with the variant FIX with one extra glycosylation site and injecting eight different hemophilia B mice with wild-type recombinant FIX. One hundred units of FIX/kg was injected into the hemophilia B mice of each group. After injection, the amount of FIX remaining in the circulation was determined at 15 minutes, 4 hr, 12 hr, 24 hr, and 48 hr. The amount of FIX remaining in the circulation was measured by ELISA using wild type FIX as a standard. Antibodies for the ELISA were obtained from Affinity Biologicals (Product numbers SAFIX-AP SAFIX-APHRP). The curve was fit to one exponential decay.

[0114] The variant FIX with one extra glycosylation site exhibited a longer half life (about 1.5 hour), as shown in FIG. 4. Further analysis of this variant will be carried out to determine whether there is complete sialylation of this FIX protein, as incomplete sialylation can result in a shorter half life, as reported by Griffith². Assays to determine the degree of sialylation are well known in the art (See, e.g., Anumula and Dhume “High resolution and high sensitivity methods for oligosaccharide mapping and characterization by normal phase high performance liquid chromatography following derivatization with highly fluorescent anthranilic acid” Glycobiology 8:685-694 (1998); Liu et al. “Human plasma N-glycoproteome analysis by immunoaffinity subtraction, hydrazide chemistry, and mass spectrometry” J. Proteome Res. 4(6):2070-2080 (2005)), the entire contents of each of which are incorporated by reference herein).

[0115] The half-life of a proteins can be influenced by many factors. Simple size has a major effect on whether a circulating protein is maintained in the circulation or is distributed throughout the body. In addition, specific binding sites may remove proteins from circulation. It is known that plasma proteins that are under-sialylated have exposed GlcNAc and Gal residues that are removed from circulation by the asialoglycoprotein liver receptors³⁻⁵. There is a family of 18 different sialyl transferase enzymes that are differentially expressed in mammalian tissues⁶. In humans, the N-glycosylated N-terminal galactoses are usually terminated by α(2,6) sialic acid. CHO or BHK cells produce FIX in which the N-glycosylated terminal galactose is capped by α(2,3)-sialylated galactose. However FIX produced in 293 cells is capped by sialic acid on α(2,6)-galactose. Under-sialylation could easily lead to an increased clearance rate from the circulation and mask the expected half-life increase resulting from the extra glycosylation. Under-sialylation may be improved either in vitro (by enzymatic ally adding sialic acids³) or in cell culture by either adding sialylation enzymes to the cells expressing recombinant FIX or by manipulating culture conditions to increase sialylation⁷⁻¹⁰. It has been shown also that transfect ion of CHO cells with the gene for Gal(β1-4)GlcNAc-R α(2,6)-sialyltransferase overwhelms the endogenous sialylation enzymes and results in the production of recombinant proteins bearing terminal α-(2,6)-sialyl-galactose as the major modification¹¹.

[0116] This study demonstrates that amino acid residues can be inserted into the activation peptide of human factor IX without materially affecting its clotting time and that these insertions have no deleterious effect on the production of human factor IX. These studies further demonstrate that any amino acid sequence can be incorporated into the activation peptide of factor IX, provided it does not contain any sequences that would loop back into the FIX protein itself and disrupt structure, as would be readily identified by one of ordinary skill in the art using well known techniques. Furthermore, amino acid sequences could be incorporated that allow chemical addition of specific sites for adding compounds such as polyethylene glycol to further extend half-life. Such sequences could be produced and tested according to standard protocols using routine experimentation.

### Example 2

### Variant Human FIX with No New Glycosylation Sites Introduced

[0117] As a demonstration that a very different sequence can also be inserted into the activation peptide of human FIX without adversely affecting the FIX molecule the following amino acid sequence FLNCCPGCCMEP (SEQ ID NO:134) was inserted into the activation peptide between amino acids 161 and 162 (numbering is based on the mature FIX amino acid sequence as shown in SEQ ID NO:33). This recombinant protein was analyzed according to the method set forth in Example 1 above and was shown to have the same functionality as wild type recombinant human FIX.

[0118] It will be understood by those of skill in the art that numerous and various modifications can be made without departing from the spirit of the present invention. Therefore, it should be clearly understood that the forms of the present invention are illustrative only and are not intended to limit the scope of the present invention.

[0119] All publications, patent applications, patents, patent publications, sequences identified by GenBank® database accession numbers and other references cited herein are incorporated by reference in their entireties for the teachings relevant to the sentence and/or paragraph in which the reference is presented.

[0120] The invention is defined by the following claims, with equivalents of the claims to be included therein.

### REFERENCES FOR EXAMPLE 1

[0121] 1. Yan S C, Razzano P, Chao Y B, et al. Characterization and novel purification of recombinant human protein C from three mammalian cell lines. Biotechnology (N Y). 1990; 8:655-661.
[0122] 2. Griffith M J, Monroe D M, van Cott D E, et al. N-GLYCAN SIALYLATION IS IMPORTANT FOR IN VIVO RECOVERY OF RECOMBINANT FACTOR IX J Thromb Haemost. 2007; 5:P-M-043.
[0123] 3. Raju T S, Briggs J B, Chamow S M, Winkler M E, Jones A J. Glycoengineering of therapeutic glycoproteins: in vitro galactosylation and sialylation of glycoproteins with terminal N-acetylglucosamine and galactose residues. Biochemistry. 2001; 40:8868-8876.
[0124] 4. Joziasse D H, Lee R T, Lee Y C, et al. alpha3-galactosylated glycoproteins can bind to the hepatic asialoglycoprotein receptor. Eur J. Biochem. 2000; 267:6501-6508.
[0125] 5. Van den Nieuwenhof I M, Koistinen H, Easton R L, et al. Recombinant glycodelin carrying the same type of glycan structures as contraceptive glycodelin-A can be produced in human kidney 293 cells but not in Chinese hamster ovary cells. Eur J Biochem. 2000; 267:4753-4762.
[0126] 6. Takashima S, Kurosawa N, Tachida Y, Inoue M, Tsuji S. Comparative analysis of the genomic structures and promoter activities of mouse Siaalpha2,3Galbeta1,3GalNAc GalNAcalpha2,6-sialyltransferase genes (ST6Ga1NAc III and IV): characterization of their Spl binding sites. J Biochem (Tokyo). 2000; 127:399-409.
[0127] 7. Chee Furng Wong D, Tin Kam Wong K, Tang Goh L, Kiat Heng C, Gek Sim Yap M. Impact of dynamic online fed-batch strategies on metabolism, productivity and N-glycosylation quality in CHO cell cultures. Biotechnol Bioeng. 2005; 89:164-177.
[0128] 8. Chen P, Harcum S W. Effects of amino acid additions on ammonium stressed CHO cells. J Biotechnol. 2005; 117:277-286.
[0129] 9. Chen P, Harcum S W. Effects of elevated ammonium on glycosylation gene expression in CHO cells. Metab Eng. 2006; 8:123-132.
[0130] 10. Nam J H, Zhang F, Ermonval M, Linhardt R J, Sharfstein S T. The effects of culture conditions on the glycosylation of secreted human placental alkaline phosphatase produced in Chinese hamster ovary cells. Biotechnol Bioeng. 2008; 100:1178-1192.
[0131] 11. Grabenhorst E, Hoffmann A, Nimtz M, Zettlmeissl G, Conradt H S. Construction of stable BHK-21 cells coexpressing human secretory glycoproteins and human Gal(beta 1-4)GlcNAc-R alpha 2,6-sialyltransferase alpha 2,6-linked NeuAc is preferentially attached to the Gal(beta 1-4)GlcNAc(beta 1-2)Man(alpha 1-3)-branch of diantennary oligosaccharides from secreted recombinant beta-trace protein. Eur J Biochem. 1995; 232:718-725.

TABLE 1

| Amino Acids | One-Letter Symbol | Common Abbreviation |
|---|---|---|
| Alanine | A | Ala |
| Arginine | R | Arg |
| Asparagine | N | Asn |
| Aspartic acid | D | Asp |
| Cysteine | C | Cys |
| Glutamine | Q | Gln |
| Glutamic acid | E | Glu |
| Glycine | G | Gly |
| Histidine | H | His |
| Isoleucine | I | Ile |
| Leucine | L | Leu |
| Lysine | K | Lys |
| Phenylalanine | F | Phe |
| Proline | P | Pro |
| Serine | S | Ser |
| Threonine | T | Thr |
| Tryptophan | W | Trp |
| Tyrosine | Y | Tyr |
| Valine | V | Val |

TABLE 2
Solvent Accessible Surface Area (ASA) calculation parameters:
Sphere radius: 1.4
Burial threshold: 0.25

| | | | | | | | SC |
|---|---|---|---|---|---|---|---|
| | | Bck | S.Chn | Total | SC Ref. | Percent | Class |
| TYR | 1 | 0.27 | 125.59 | 125.86 | 232.25 | 54.08 | E |
| ASN | 2 | 7.49 | 64.20 | 71.70 | 152.56 | 42.08 | E |
| SER | 3 | 31.85 | 35.49 | 67.34 | 104.76 | 33.88 | E |
| GLY | 4 | 35.78 | 13.41 | 49.18 | 30.80 | 43.53 | E |
| LYS | 5 | 16.74 | 158.41 | 175.15 | 217.63 | 72.79 | E |
| LEU | 6 | 8.28 | 135.99 | 144.28 | 185.25 | 73.41 | E |
| GLU | 7 | 8.50 | 21.04 | 29.54 | 168.29 | 12.50 | B |
| GLU | 8 | 30.76 | 44.77 | 75.53 | 168.29 | 26.60 | E |
| PHE | 9 | 24.15 | 164.83 | 188.98 | 220.07 | 74.90 | E |
| VAL | 10 | 13.07 | 51.73 | 64.80 | 157.34 | 32.88 | E |
| GLN | 11 | 31.24 | 149.22 | 180.46 | 183.52 | 81.31 | E |
| GLY | 12 | 24.92 | 3.98 | 28.90 | 30.80 | 12.91 | B |
| ASN | 13 | 6.63 | 59.16 | 65.79 | 152.56 | 38.78 | E |
| LEU | 14 | 11.27 | 83.39 | 94.66 | 185.25 | 45.02 | E |
| GLU | 15 | 2.60 | 116.90 | 119.50 | 168.29 | 69.47 | E |
| ARG | 16 | 0.86 | 88.62 | 89.49 | 249.57 | 35.51 | E |
| GLU | 17 | 0.00 | 18.71 | 18.71 | 168.29 | 11.12 | B |
| CYS | 18 | 8.83 | 5.31 | 14.14 | 129.22 | 4.11 | B |
| MET | 19 | 18.21 | 138.84 | 157.06 | 195.71 | 70.94 | E |
| GLU | 20 | 39.22 | 46.20 | 85.41 | 168.29 | 27.45 | E |
| GLU | 21 | 13.25 | 19.74 | 32.98 | 168.29 | 11.73 | B |
| LYS | 22 | 14.47 | 176.83 | 191.30 | 217.63 | 81.25 | E |
| CYS | 23 | 16.54 | 4.14 | 20.68 | 129.22 | 3.20 | B |
| SER | 24 | 7.99 | 31.53 | 39.52 | 104.76 | 30.10 | E |
| PHE | 25 | 5.59 | 64.06 | 69.65 | 220.07 | 29.11 | E |
| GLU | 26 | 5.05 | 82.90 | 87.96 | 168.29 | 49.26 | E |
| GLU | 27 | 1.52 | 7.49 | 9.00 | 168.29 | 4.45 | B |
| ALA | 28 | 4.70 | 3.15 | 7.85 | 86.68 | 3.63 | B |
| ARG | 29 | 4.39 | 118.91 | 123.30 | 249.57 | 47.64 | E |
| GLU | 30 | 32.80 | 52.38 | 85.18 | 168.29 | 31.13 | E |
| VAL | 31 | 26.79 | 57.63 | 84.42 | 157.34 | 36.63 | E |
| PHE | 32 | 15.66 | 55.53 | 71.18 | 220.07 | 25.23 | E |
| GLU | 33 | 38.84 | 97.20 | 136.05 | 168.29 | 57.76 | E |
| ASN | 34 | 8.70 | 57.51 | 66.21 | 152.56 | 37.70 | E |
| THR | 35 | 6.61 | 62.61 | 69.22 | 141.80 | 44.15 | E |
| GLU | 36 | 4.28 | 98.00 | 102.28 | 168.29 | 58.23 | E |
| ARG | 37 | 2.80 | 119.95 | 122.76 | 249.57 | 48.06 | E |
| THR | 38 | 0.00 | 0.00 | 0.00 | 141.80 | 0.00 | B |
| THR | 39 | 0.00 | 54.41 | 54.41 | 141.80 | 38.37 | E |
| GLU | 40 | 10.13 | 57.40 | 67.54 | 168.29 | 34.11 | E |
| PHE | 41 | 8.14 | 42.37 | 50.50 | 220.07 | 19.25 | B |
| TRP | 42 | 0.00 | 61.69 | 61.69 | 267.74 | 23.04 | B |
| LYS | 43 | 10.33 | 119.92 | 130.25 | 217.63 | 55.10 | E |
| GLN | 44 | 4.98 | 133.39 | 138.37 | 183.52 | 72.69 | E |
| TYR | 45 | 25.77 | 75.81 | 101.58 | 232.25 | 32.64 | E |
| VAL | 46 | 8.23 | 65.11 | 73.35 | 157.34 | 41.38 | E |
| ASP | 47 | 20.51 | 55.77 | 76.27 | 135.82 | 41.06 | E |
| GLY | 48 | 10.54 | 2.70 | 13.24 | 30.80 | 8.77 | B |
| ASP | 49 | 0.58 | 35.16 | 35.73 | 135.82 | 25.89 | E |
| GLN | 50 | 6.81 | 104.99 | 111.80 | 183.52 | 57.21 | E |
| CYS | 51 | 3.97 | 22.00 | 25.97 | 129.22 | 17.03 | B |
| GLU | 52 | 31.64 | 139.49 | 171.12 | 168.29 | 82.89 | E |
| SER | 53 | 37.04 | 48.46 | 85.50 | 104.76 | 46.26 | E |
| ASN | 54 | 16.68 | 102.95 | 119.64 | 152.56 | 67.48 | E |
| PRO | 55 | 19.36 | 7.93 | 27.29 | 158.05 | 5.02 | B |
| CYS | 56 | 12.01 | 2.30 | 14.30 | 129.22 | 1.78 | B |
| LEU | 57 | 6.35 | 89.67 | 96.02 | 185.25 | 48.40 | E |
| ASN | 58 | 49.16 | 42.59 | 91.75 | 152.56 | 27.92 | E |
| GLY | 59 | 48.82 | 13.15 | 61.97 | 30.80 | 42.69 | E |
| GLY | 60 | 3.57 | 0.40 | 3.97 | 30.80 | 1.30 | B |
| SER | 61 | 11.00 | 85.41 | 96.41 | 104.76 | 81.53 | E |
| CYS | 62 | 17.13 | 1.83 | 18.96 | 129.22 | 1.42 | B |
| LYS | 63 | 7.94 | 139.66 | 147.60 | 217.63 | 64.17 | E |
| ASP | 64 | 15.09 | 57.49 | 72.58 | 135.82 | 42.32 | E |
| ASP | 65 | 7.60 | 43.64 | 51.24 | 135.82 | 32.13 | E |
| ILE | 66 | 30.84 | 144.89 | 175.73 | 187.72 | 77.18 | E |
| ASN | 67 | 13.32 | 122.54 | 135.85 | 152.56 | 80.32 | E |
| SER | 68 | 3.81 | 36.41 | 40.23 | 104.76 | 34.76 | E |
| TYR | 69 | 14.11 | 26.83 | 40.93 | 232.25 | 11.55 | B |
| GLU | 70 | 5.59 | 73.21 | 78.80 | 168.29 | 43.50 | E |
| CYS | 71 | 6.68 | 0.67 | 7.35 | 129.22 | 0.52 | B |
| TRP | 72 | 7.49 | 115.47 | 122.97 | 267.74 | 43.13 | E |
| CYS | 73 | 1.76 | 7.99 | 9.75 | 129.22 | 6.19 | B |
| PRO | 74 | 6.36 | 67.68 | 74.04 | 158.05 | 42.82 | E |
| PHE | 75 | 7.24 | 67.64 | 74.88 | 220.07 | 30.73 | E |
| GLY | 76 | 5.84 | 8.63 | 14.47 | 30.80 | 28.03 | E |
| PHE | 77 | 1.57 | 60.84 | 62.41 | 220.07 | 27.65 | E |
| GLU | 78 | 4.54 | 42.38 | 46.92 | 168.29 | 25.18 | E |
| GLY | 79 | 33.91 | 4.27 | 38.18 | 30.80 | 13.86 | B |
| LYS | 80 | 28.88 | 148.45 | 177.33 | 217.63 | 68.21 | E |
| ASN | 81 | 0.00 | 33.47 | 33.47 | 152.56 | 21.94 | B |
| CYS | 82 | 0.00 | 0.23 | 0.23 | 129.22 | 0.18 | B |
| GLU | 83 | 19.73 | 71.03 | 90.77 | 168.29 | 42.21 | E |
| LEU | 84 | 1.61 | 106.59 | 108.20 | 185.25 | 57.54 | E |
| ASP | 85 | 5.18 | 78.25 | 83.43 | 135.82 | 57.61 | E |
| VAL | 86 | 0.61 | 0.52 | 1.13 | 157.34 | 0.33 | B |
| THR | 87 | 0.56 | 59.85 | 60.41 | 141.80 | 42.21 | E |
| CYS | 88 | 12.82 | 25.94 | 38.77 | 129.22 | 20.08 | B |
| ASN | 89 | 32.29 | 109.18 | 141.47 | 152.56 | 71.56 | E |
| ILE | 90 | 9.42 | 71.41 | 80.83 | 187.72 | 38.04 | E |
| LYS | 91 | 31.54 | 47.20 | 78.74 | 217.63 | 21.69 | B |
| ASN | 92 | 14.48 | 28.84 | 43.32 | 152.56 | 18.90 | B |
| GLY | 93 | 0.00 | 0.00 | 0.00 | 30.80 | 0.00 | B |
| ARG | 94 | 4.85 | 114.06 | 118.90 | 249.57 | 45.70 | E |
| CYS | 95 | 0.00 | 0.00 | 0.00 | 129.22 | 0.00 | B |
| GLU | 96 | 0.10 | 40.37 | 40.48 | 168.29 | 23.99 | B |
| GLN | 97 | 0.00 | 0.00 | 0.00 | 183.52 | 0.00 | B |
| PHE | 98 | 0.00 | 38.92 | 38.92 | 220.07 | 17.68 | B |
| CYS | 99 | 0.93 | 1.21 | 2.13 | 129.22 | 0.93 | B |
| LYS | 100 | 1.98 | 161.78 | 163.76 | 217.63 | 74.34 | E |
| ASN | 101 | 26.90 | 32.19 | 59.09 | 152.56 | 21.10 | B |
| SER | 102 | 17.07 | 15.09 | 32.17 | 104.76 | 14.41 | B |
| ALA | 103 | 53.92 | 73.38 | 127.30 | 86.68 | 84.65 | E |
| ASP | 104 | 29.80 | 71.30 | 101.10 | 135.82 | 52.49 | E |
| ASN | 105 | 5.98 | 116.68 | 122.66 | 152.56 | 76.48 | E |
| LYS | 106 | 6.97 | 78.17 | 85.14 | 217.63 | 35.92 | E |
| VAL | 107 | 2.15 | 2.48 | 4.63 | 157.34 | 1.57 | B |
| VAL | 108 | 4.70 | 79.48 | 84.18 | 157.34 | 50.52 | E |
| CYS | 109 | 6.11 | 0.74 | 6.84 | 129.22 | 0.57 | B |
| SER | 110 | 3.10 | 48.75 | 51.85 | 104.76 | 46.53 | E |
| CYS | 111 | 19.48 | 3.24 | 22.72 | 129.22 | 2.51 | B |
| THR | 112 | 1.32 | 1.85 | 3.17 | 141.80 | 1.31 | B |
| GLU | 113 | 16.54 | 86.13 | 102.67 | 168.29 | 51.18 | E |
| GLY | 114 | 27.26 | 2.40 | 29.66 | 30.80 | 7.79 | B |
| TYR | 115 | 19.30 | 0.93 | 20.23 | 232.25 | 0.40 | B |
| ARG | 116 | 7.93 | 125.32 | 133.25 | 249.57 | 50.22 | E |
| LEU | 117 | 24.16 | 36.08 | 60.24 | 185.25 | 19.48 | B |
| ALA | 118 | 6.67 | 13.31 | 19.98 | 86.68 | 15.36 | B |
| GLU | 119 | 24.69 | 145.15 | 169.84 | 168.29 | 86.25 | E |
| ASN | 120 | 31.18 | 62.55 | 93.73 | 152.56 | 41.00 | E |
| GLN | 121 | 3.07 | 82.40 | 85.46 | 183.52 | 44.90 | E |
| LYS | 122 | 0.00 | 38.14 | 38.14 | 217.63 | 17.53 | B |
| SER | 123 | 0.12 | 38.91 | 39.03 | 104.76 | 37.14 | E |
| CYS | 124 | 1.30 | 0.00 | 1.30 | 129.22 | 0.00 | B |
| GLU | 125 | 5.57 | 83.86 | 89.42 | 168.29 | 49.83 | E |
| PRO | 126 | 10.45 | 60.74 | 71.18 | 158.05 | 38.43 | E |
| ALA | 127 | 27.45 | 24.33 | 51.79 | 86.68 | 28.07 | E |
| VAL | 128 | 9.37 | 73.68 | 83.05 | 157.34 | 46.83 | E |
| PRO | 129 | 27.18 | 94.73 | 121.91 | 158.05 | 59.94 | E |
| PHE | 130 | 9.31 | 54.32 | 63.63 | 220.07 | 24.68 | B |
| PRO | 131 | 9.64 | 8.80 | 18.44 | 158.05 | 5.57 | B |
| CYS | 132 | 3.95 | 17.82 | 21.77 | 129.22 | 13.79 | B |
| GLY | 133 | 0.20 | 0.00 | 0.20 | 30.80 | 0.00 | B |
| ARG | 134 | 1.28 | 63.41 | 64.69 | 249.57 | 25.41 | E |
| VAL | 135 | 3.16 | 22.36 | 25.51 | 157.34 | 14.21 | B |
| SER | 136 | 4.80 | 9.07 | 13.87 | 104.76 | 8.66 | B |
| VAL | 137 | 6.47 | 1.77 | 8.24 | 157.34 | 1.13 | B |
| SER | 138 | 0.97 | 46.05 | 47.03 | 104.76 | 43.96 | E |
| GLN | 139 | 37.96 | 108.90 | 146.86 | 183.52 | 59.34 | E |
| THR | 140 | 23.25 | 93.55 | 116.79 | 141.80 | 65.97 | E |
| SER | 141 | 10.17 | 0.52 | 10.69 | 104.76 | 0.49 | B |
| LYS | 142 | 9.33 | 172.08 | 181.41 | 217.63 | 79.07 | E |
| LEU | 143 | 16.86 | 120.73 | 137.60 | 185.25 | 65.17 | E |
| THR | 144 | 7.19 | 6.03 | 13.22 | 141.80 | 4.25 | B |
| ARG | 145 | 18.07 | 91.85 | 109.92 | 249.57 | 36.80 | E |
| ALA | 146 | 37.80 | 70.61 | 108.41 | 86.68 | 81.46 | E |
| GLU | 147 | 9.26 | 89.70 | 98.96 | 168.29 | 53.30 | E |
| ALA | 148 | 29.35 | 71.17 | 100.53 | 86.68 | 82.11 | E |
| VAL | 149 | 3.62 | 80.97 | 84.60 | 157.34 | 51.46 | E |
| PHE | 150 | 0.00 | 22.28 | 22.28 | 220.07 | 10.13 | B |
| PRO | 151 | 11.40 | 93.90 | 105.30 | 158.05 | 59.41 | E |
| ASP | 152 | 8.22 | 89.42 | 97.64 | 135.82 | 65.84 | E |
| VAL | 153 | 0.33 | 53.16 | 53.49 | 157.34 | 33.79 | E |
| ASP | 154 | 0.94 | 45.36 | 46.31 | 135.82 | 33.40 | E |
| TYR | 155 | 39.87 | 135.86 | 175.72 | 232.25 | 58.50 | E |
| VAL | 156 | 2.41 | 81.67 | 84.09 | 157.34 | 51.91 | E |
| ASN | 157 | 15.87 | 53.80 | 69.67 | 152.56 | 35.27 | E |
| SER | 158 | 9.86 | 52.72 | 62.58 | 104.76 | 50.33 | E |
| THR | 159 | 37.44 | 87.63 | 125.07 | 141.80 | 61.80 | E |
| GLU | 160 | 19.85 | 122.04 | 141.89 | 168.29 | 72.52 | E |
| ALA | 161 | 21.20 | 10.01 | 31.21 | 86.68 | 11.54 | B |
| GLU | 162 | 15.99 | 96.79 | 112.78 | 168.29 | 57.52 | E |
| THR | 163 | 9.85 | 112.60 | 122.45 | 141.80 | 79.41 | E |
| ILE | 164 | 13.67 | 123.33 | 137.00 | 187.72 | 65.70 | E |
| LEU | 165 | 0.78 | 34.33 | 35.11 | 185.25 | 18.53 | B |
| ASP | 166 | 1.58 | 75.75 | 77.34 | 135.82 | 55.78 | E |
| ASN | 167 | 2.85 | 72.64 | 75.50 | 152.56 | 47.62 | E |
| ILE | 168 | 0.00 | 3.68 | 3.68 | 187.72 | 1.96 | B |
| THR | 169 | 0.19 | 26.20 | 26.39 | 141.80 | 18.48 | B |
| GLN | 170 | 9.30 | 96.68 | 105.98 | 183.52 | 52.68 | E |
| SER | 171 | 6.68 | 5.60 | 12.29 | 104.76 | 5.35 | B |
| THR | 172 | 11.09 | 12.16 | 23.26 | 141.80 | 8.58 | B |
| GLN | 173 | 35.92 | 68.99 | 104.91 | 183.52 | 37.59 | E |
| SER | 174 | 25.99 | 50.08 | 76.07 | 104.76 | 47.80 | E |
| PHE | 175 | 25.20 | 99.76 | 124.96 | 220.07 | 45.33 | E |
| ASN | 176 | 20.49 | 60.35 | 80.83 | 152.56 | 39.56 | E |
| ASP | 177 | 9.36 | 59.18 | 68.54 | 135.82 | 43.57 | E |
| PHE | 178 | 0.03 | 92.07 | 92.10 | 220.07 | 41.84 | E |
| THR | 179 | 0.02 | 23.46 | 23.48 | 141.80 | 16.55 | B |
| ARG | 180 | 0.00 | 106.62 | 106.62 | 249.57 | 42.72 | E |
| VAL | 181 | 0.81 | 51.30 | 52.11 | 157.34 | 32.61 | E |
| VAL | 182 | 19.24 | 109.54 | 128.78 | 157.34 | 69.62 | E |
| GLY | 183 | 24.71 | 13.96 | 38.67 | 30.80 | 45.34 | E |
| GLY | 184 | 8.70 | 0.60 | 9.31 | 30.80 | 1.96 | B |
| GLU | 185 | 0.17 | 12.09 | 12.25 | 168.29 | 7.18 | B |
| ASP | 186 | 14.39 | 65.47 | 79.86 | 135.82 | 48.20 | E |
| ALA | 187 | 4.77 | 0.00 | 4.77 | 86.68 | 0.00 | B |
| LYS | 188 | 1.92 | 14.45 | 16.36 | 217.63 | 6.64 | B |
| PRO | 189 | 0.57 | 6.07 | 6.64 | 158.05 | 3.84 | B |
| GLY | 190 | 8.40 | 0.00 | 8.40 | 30.80 | 0.00 | B |
| GLN | 191 | 3.54 | 30.26 | 33.80 | 183.52 | 16.49 | B |
| PHE | 192 | 7.66 | 6.33 | 13.98 | 220.07 | 2.88 | B |
| PRO | 193 | 4.58 | 0.31 | 4.89 | 158.05 | 0.20 | B |
| TRP | 194 | 0.00 | 2.91 | 2.91 | 267.74 | 1.09 | B |
| GLN | 195 | 4.69 | 0.06 | 4.75 | 183.52 | 0.03 | B |
| VAL | 196 | 0.00 | 0.00 | 0.00 | 157.34 | 0.00 | B |
| VAL | 197 | 0.08 | 16.00 | 16.08 | 157.34 | 10.17 | B |
| LEU | 198 | 0.00 | 0.00 | 0.00 | 185.25 | 0.00 | B |
| ASN | 199 | 0.00 | 61.15 | 61.15 | 152.56 | 40.08 | E |
| GLY | 200 | 6.11 | 0.00 | 6.11 | 30.80 | 0.00 | B |
| LYS | 201 | 6.18 | 73.82 | 80.00 | 217.63 | 33.92 | E |
| VAL | 202 | 50.22 | 117.81 | 168.03 | 157.34 | 74.88 | E |
| ASP | 203 | 8.10 | 60.74 | 68.84 | 135.82 | 44.72 | E |
| ALA | 204 | 4.63 | 30.78 | 35.41 | 86.68 | 35.51 | E |
| PHE | 205 | 10.41 | 13.15 | 23.56 | 220.07 | 5.98 | B |
| CYS | 206 | 0.45 | 0.90 | 1.36 | 129.22 | 0.70 | B |
| GLY | 207 | 0.00 | 0.00 | 0.00 | 30.80 | 0.00 | B |
| GLY | 208 | 0.00 | 0.00 | 0.00 | 30.80 | 0.00 | B |
| SER | 209 | 0.00 | 0.00 | 0.00 | 104.76 | 0.00 | B |
| ILE | 210 | 0.00 | 0.00 | 0.00 | 187.72 | 0.00 | B |
| VAL | 211 | 15.63 | 4.49 | 20.12 | 157.34 | 2.85 | B |
| ASN | 212 | 3.85 | 43.00 | 46.85 | 152.56 | 28.19 | E |
| GLU | 213 | 2.18 | 87.87 | 90.05 | 168.29 | 52.22 | E |
| LYS | 214 | 0.00 | 56.82 | 56.82 | 217.63 | 26.11 | E |
| TRP | 215 | 0.00 | 28.11 | 28.11 | 267.74 | 10.50 | B |
| ILE | 216 | 0.00 | 0.00 | 0.00 | 187.72 | 0.00 | B |
| VAL | 217 | 0.00 | 0.00 | 0.00 | 157.34 | 0.00 | B |
| THR | 218 | 0.00 | 0.00 | 0.00 | 141.80 | 0.00 | B |
| ALA | 219 | 0.00 | 0.00 | 0.00 | 86.68 | 0.00 | B |
| ALA | 220 | 0.72 | 0.00 | 0.72 | 86.68 | 0.00 | B |
| CYS | 222 | 0.15 | 0.00 | 0.15 | 129.22 | 0.00 | B |
| VAL | 223 | 3.08 | 0.33 | 3.40 | 157.34 | 0.21 | B |
| GLU | 224 | 5.42 | 62.67 | 68.09 | 168.29 | 37.24 | E |
| THR | 225 | 55.43 | 85.50 | 140.93 | 141.80 | 60.30 | E |
| GLY | 226 | 23.22 | 15.40 | 38.62 | 30.80 | 49.99 | E |
| VAL | 227 | 14.36 | 32.05 | 46.41 | 157.34 | 20.37 | B |
| LYS | 228 | 21.74 | 169.93 | 191.67 | 217.63 | 78.08 | E |
| ILE | 229 | 1.70 | 0.00 | 1.70 | 187.72 | 0.00 | B |
| THR | 230 | 0.00 | 43.99 | 43.99 | 141.80 | 31.02 | E |
| VAL | 231 | 1.40 | 0.00 | 1.40 | 157.34 | 0.00 | B |
| VAL | 232 | 0.00 | 22.26 | 22.26 | 157.34 | 14.15 | B |
| ALA | 233 | 0.00 | 0.00 | 0.00 | 86.68 | 0.00 | B |
| GLY | 234 | 5.58 | 0.00 | 5.58 | 30.80 | 0.00 | B |
| GLU | 235 | 11.21 | 10.69 | 21.90 | 168.29 | 6.35 | B |
| ASN | 237 | 0.00 | 24.88 | 24.88 | 152.56 | 16.31 | B |
| ILE | 238 | 25.21 | 36.69 | 61.90 | 187.72 | 19.54 | B |
| GLU | 239 | 35.47 | 73.18 | 108.65 | 168.29 | 43.48 | E |
| GLU | 240 | 6.25 | 104.93 | 111.18 | 168.29 | 62.35 | E |
| THR | 241 | 27.21 | 106.54 | 133.75 | 141.80 | 75.13 | E |
| GLU | 242 | 13.37 | 27.36 | 40.73 | 168.29 | 16.26 | B |
| THR | 244 | 7.49 | 10.34 | 17.83 | 141.80 | 7.29 | B |
| GLU | 245 | 14.27 | 29.00 | 43.27 | 168.29 | 17.23 | B |
| GLN | 246 | 4.49 | 22.72 | 27.22 | 183.52 | 12.38 | B |
| LYS | 247 | 12.94 | 163.01 | 175.95 | 217.63 | 74.90 | E |
| ARG | 248 | 7.70 | 34.16 | 41.85 | 249.57 | 13.69 | B |
| ASN | 249 | 4.99 | 64.87 | 69.87 | 152.56 | 42.52 | E |
| VAL | 250 | 8.42 | 0.00 | 8.42 | 157.34 | 0.00 | B |
| ILE | 251 | 32.72 | 66.80 | 99.51 | 187.72 | 35.58 | E |
| ARG | 252 | 4.11 | 113.04 | 117.14 | 249.57 | 45.29 | E |
| ILE | 253 | 2.07 | 32.52 | 34.58 | 187.72 | 17.32 | B |
| ILE | 254 | 5.06 | 124.37 | 129.43 | 187.72 | 66.25 | E |
| PRO | 255 | 1.25 | 22.02 | 23.27 | 158.05 | 13.94 | B |
| ASN | 258 | 3.97 | 73.90 | 77.87 | 152.56 | 48.44 | E |
| TYR | 259 | 8.25 | 19.59 | 27.84 | 232.25 | 8.43 | B |
| ASN | 260 | 36.09 | 85.16 | 121.25 | 152.56 | 55.82 | E |
| ALA | 261 | 27.50 | 23.02 | 50.52 | 86.68 | 26.55 | E |
| ALA | 262 | 54.08 | 69.46 | 123.54 | 86.68 | 80.14 | E |
| ILE | 263 | 13.33 | 75.87 | 89.19 | 187.72 | 40.41 | E |
| ASN | 264 | 16.68 | 24.65 | 41.33 | 152.56 | 16.16 | B |
| LYS | 265 | 4.07 | 126.06 | 130.12 | 217.63 | 57.92 | E |
| TYR | 266 | 0.38 | 51.66 | 52.04 | 232.25 | 22.24 | B |
| ASN | 267 | 1.12 | 9.95 | 11.07 | 152.56 | 6.52 | B |
| ASP | 269 | 0.00 | 3.49 | 3.49 | 135.82 | 2.57 | B |
| ILE | 270 | 0.00 | 0.00 | 0.00 | 187.72 | 0.00 | B |
| ALA | 271 | 0.00 | 0.00 | 0.00 | 86.68 | 0.00 | B |
| LEU | 272 | 1.11 | 0.07 | 1.18 | 185.25 | 0.04 | B |
| LEU | 273 | 0.34 | 0.00 | 0.34 | 185.25 | 0.00 | B |
| GLU | 274 | 0.00 | 18.28 | 18.28 | 168.29 | 10.86 | B |
| LEU | 275 | 0.00 | 0.00 | 0.00 | 185.25 | 0.00 | B |
| ASP | 276 | 16.49 | 57.20 | 73.69 | 135.82 | 42.11 | E |
| GLU | 277 | 2.61 | 96.37 | 98.99 | 168.29 | 57.27 | E |
| PRO | 278 | 2.44 | 69.22 | 71.66 | 158.05 | 43.80 | E |
| LEU | 279 | 3.48 | 0.00 | 3.48 | 185.25 | 0.00 | B |
| VAL | 280 | 4.62 | 111.51 | 116.13 | 157.34 | 70.87 | E |
| LEU | 281 | 15.17 | 28.43 | 43.60 | 185.25 | 15.35 | B |
| ASN | 282 | 0.29 | 40.69 | 40.98 | 152.56 | 26.67 | E |
| SER | 283 | 2.66 | 27.61 | 30.27 | 104.76 | 26.35 | E |
| TYR | 284 | 1.12 | 51.82 | 52.94 | 232.25 | 22.31 | B |
| VAL | 285 | 0.00 | 0.00 | 0.00 | 157.34 | 0.00 | B |
| THR | 286 | 0.00 | 0.95 | 0.95 | 141.80 | 0.67 | B |
| PRO | 287 | 0.00 | 5.93 | 5.93 | 158.05 | 3.75 | B |
| ILE | 288 | 2.87 | 0.12 | 2.98 | 187.72 | 0.06 | B |
| CYS | 289 | 1.72 | 0.15 | 1.87 | 129.22 | 0.11 | B |
| ILE | 290 | 17.34 | 23.72 | 41.07 | 187.72 | 12.64 | B |
| ALA | 291 | 14.96 | 0.76 | 15.71 | 86.68 | 0.88 | B |
| ASP | 292 | 17.82 | 71.99 | 89.81 | 135.82 | 53.01 | E |
| LYS | 293 | 0.30 | 128.24 | 128.55 | 217.63 | 58.93 | E |
| GLU | 294 | 2.05 | 120.77 | 122.82 | 168.29 | 71.76 | E |
| TYR | 295 | 0.04 | 41.29 | 41.33 | 232.25 | 17.78 | B |
| THR | 296 | 0.00 | 0.61 | 0.61 | 141.80 | 0.43 | B |
| ASN | 297 | 0.00 | 62.71 | 62.71 | 152.56 | 41.11 | E |
| ILE | 298 | 4.83 | 94.49 | 99.32 | 187.72 | 50.34 | E |
| PHE | 299 | 3.42 | 14.54 | 17.97 | 220.07 | 6.61 | B |
| LEU | 300 | 2.16 | 9.56 | 11.72 | 185.25 | 5.16 | B |
| LYS | 301 | 25.40 | 142.97 | 168.37 | 217.63 | 65.69 | E |
| PHE | 302 | 27.30 | 158.84 | 186.14 | 220.07 | 72.18 | E |
| GLY | 303 | 8.18 | 18.77 | 26.95 | 30.80 | 60.93 | E |
| SER | 304 | 9.64 | 28.10 | 37.74 | 104.76 | 26.83 | E |
| GLY | 305 | 4.68 | 0.00 | 4.68 | 30.80 | 0.00 | B |
| TYR | 306 | 0.02 | 72.96 | 72.98 | 232.25 | 31.41 | E |
| VAL | 307 | 0.43 | 6.79 | 7.22 | 157.34 | 4.32 | B |
| SER | 308 | 2.56 | 0.03 | 2.59 | 104.76 | 0.02 | B |
| GLY | 309 | 0.06 | 0.00 | 0.06 | 30.80 | 0.00 | B |
| TRP | 310 | 0.48 | 6.95 | 7.43 | 267.74 | 2.60 | B |
| GLY | 311 | 14.74 | 1.12 | 15.86 | 30.80 | 3.63 | B |
| ARG | 312 | 27.44 | 38.98 | 66.42 | 249.57 | 15.62 | B |
| VAL | 313 | 39.36 | 64.84 | 104.20 | 157.34 | 41.21 | E |
| PHE | 314 | 16.57 | 135.17 | 151.73 | 220.07 | 61.42 | E |
| LYS | 316 | 29.68 | 122.27 | 151.95 | 217.63 | 56.18 | E |
| GLY | 317 | 11.82 | 0.00 | 11.82 | 30.80 | 0.00 | B |
| ARG | 318 | 7.84 | 121.48 | 129.32 | 249.57 | 48.67 | E |
| SER | 319 | 3.30 | 5.88 | 9.18 | 104.76 | 5.61 | B |
| ALA | 320 | 14.51 | 29.06 | 43.57 | 86.68 | 33.52 | E |
| LEU | 321 | 0.05 | 87.51 | 87.55 | 185.25 | 47.24 | E |
| VAL | 322 | 0.00 | 20.76 | 20.76 | 157.34 | 13.19 | B |
| LEU | 323 | 0.00 | 6.41 | 6.41 | 185.25 | 3.46 | B |
| GLN | 324 | 2.61 | 21.41 | 24.02 | 183.52 | 11.66 | B |
| TYR | 325 | 2.73 | 19.35 | 22.09 | 232.25 | 8.33 | B |
| LEU | 326 | 0.00 | 0.03 | 0.03 | 185.25 | 0.02 | B |
| ARG | 327 | 0.00 | 113.77 | 113.77 | 249.57 | 45.59 | E |
| VAL | 328 | 0.01 | 1.68 | 1.69 | 157.34 | 1.07 | B |
| PRO | 329 | 0.02 | 39.18 | 39.20 | 158.05 | 24.79 | B |
| LEU | 330 | 17.34 | 52.97 | 70.31 | 185.25 | 28.59 | E |
| VAL | 331 | 5.59 | 3.04 | 8.63 | 157.34 | 1.93 | B |
| ASP | 332 | 18.64 | 75.55 | 94.18 | 135.82 | 55.62 | E |
| ARG | 333 | 9.89 | 133.09 | 142.98 | 249.57 | 53.33 | E |
| ALA | 334 | 8.14 | 30.31 | 38.44 | 86.68 | 34.96 | E |
| THR | 335 | 2.05 | 47.23 | 49.27 | 141.80 | 33.31 | E |
| CYS | 336 | 0.00 | 0.22 | 0.22 | 129.22 | 0.17 | B |
| LEU | 337 | 2.01 | 79.09 | 81.10 | 185.25 | 42.69 | E |
| ARG | 338 | 33.37 | 177.73 | 211.10 | 249.57 | 71.21 | E |
| SER | 339 | 20.57 | 5.99 | 26.56 | 104.76 | 5.72 | B |
| THR | 340 | 20.65 | 4.56 | 25.21 | 141.80 | 3.22 | B |
| LYS | 341 | 43.24 | 145.22 | 188.46 | 217.63 | 66.73 | E |
| PHE | 342 | 14.62 | 24.42 | 39.04 | 220.07 | 11.10 | B |
| THR | 343 | 9.93 | 93.74 | 103.68 | 141.80 | 66.11 | E |
| ILE | 344 | 19.59 | 6.66 | 26.25 | 187.72 | 3.55 | B |
| TYR | 345 | 9.63 | 83.94 | 93.56 | 232.25 | 36.14 | E |
| ASN | 346 | 8.78 | 116.51 | 125.29 | 152.56 | 76.37 | E |
| ASN | 347 | 1.44 | 17.46 | 18.90 | 152.56 | 11.44 | B |
| MET | 348 | 5.65 | 1.01 | 6.66 | 195.71 | 0.52 | B |
| PHE | 349 | 2.97 | 5.49 | 8.46 | 220.07 | 2.50 | B |
| CYS | 350 | 0.34 | 0.00 | 0.34 | 129.22 | 0.00 | B |
| ALA | 351 | 2.12 | 0.15 | 2.27 | 86.68 | 0.17 | B |
| GLY | 352 | 2.51 | 0.00 | 2.51 | 30.80 | 0.00 | B |
| PHE | 353 | 1.64 | 19.67 | 21.31 | 220.07 | 8.94 | B |
| GLU | 355 | 13.85 | 62.67 | 76.51 | 168.29 | 37.24 | E |
| GLY | 356 | 20.68 | 0.00 | 20.69 | 30.80 | 0.01 | B |
| GLY | 357 | 22.76 | 4.81 | 27.58 | 30.80 | 15.63 | B |
| ARG | 358 | 1.89 | 66.71 | 68.60 | 249.57 | 26.73 | E |
| ASP | 359 | 9.52 | 11.56 | 21.07 | 135.82 | 8.51 | B |
| SER | 360 | 13.75 | 11.98 | 25.73 | 104.76 | 11.43 | B |
| CYS | 361 | 14.62 | 38.52 | 53.15 | 129.22 | 29.81 | E |
| GLN | 362 | 1.88 | 39.36 | 41.24 | 183.52 | 21.45 | B |
| GLY | 363 | 12.98 | 1.09 | 14.07 | 30.80 | 3.53 | B |
| ASP | 364 | 3.70 | 4.29 | 7.99 | 135.82 | 3.16 | B |
| SER | 365 | 1.74 | 5.22 | 6.96 | 104.76 | 4.98 | B |
| GLY | 366 | 0.00 | 0.00 | 0.00 | 30.80 | 0.00 | B |
| GLY | 367 | 2.61 | 1.56 | 4.17 | 30.80 | 5.07 | B |
| PRO | 368 | 0.92 | 0.00 | 0.92 | 158.05 | 0.00 | B |
| VAL | 370 | 0.00 | 1.87 | 1.87 | 157.34 | 1.19 | B |
| THR | 371 | 0.36 | 6.97 | 7.34 | 141.80 | 4.92 | B |
| GLU | 372 | 30.42 | 54.74 | 85.16 | 168.29 | 32.53 | E |
| VAL | 373 | 4.82 | 14.38 | 19.20 | 157.34 | 9.14 | B |
| GLU | 374 | 42.40 | 67.06 | 109.46 | 168.29 | 39.85 | E |
| GLY | 375 | 14.57 | 17.57 | 32.14 | 30.80 | 57.04 | E |
| THR | 376 | 0.00 | 0.00 | 0.00 | 141.80 | 0.00 | B |
| SER | 377 | 0.00 | 9.63 | 9.63 | 104.76 | 9.19 | B |
| PHE | 378 | 0.00 | 0.08 | 0.08 | 220.07 | 0.04 | B |
| LEU | 379 | 0.31 | 0.02 | 0.33 | 185.25 | 0.01 | B |
| THR | 380 | 0.00 | 0.00 | 0.00 | 141.80 | 0.00 | B |
| GLY | 381 | 0.00 | 0.00 | 0.00 | 30.80 | 0.00 | B |
| ILE | 382 | 0.00 | 0.00 | 0.00 | 187.72 | 0.00 | B |
| ILE | 383 | 0.00 | 2.10 | 2.10 | 187.72 | 1.12 | B |
| SER | 384 | 1.95 | 0.00 | 1.95 | 104.76 | 0.00 | B |
| TRP | 385 | 1.30 | 110.40 | 111.70 | 267.74 | 41.24 | E |
| GLY | 386 | 23.92 | 0.65 | 24.57 | 30.80 | 2.12 | B |
| GLU | 387 | 32.54 | 33.31 | 65.85 | 168.29 | 19.80 | B |
| GLU | 388 | 9.64 | 90.20 | 99.84 | 168.29 | 53.60 | E |
| CYS | 389 | 31.77 | 22.87 | 54.64 | 129.22 | 17.70 | B |
| ALA | 390 | 25.02 | 65.91 | 90.92 | 86.68 | 76.04 | E |
| MET | 391 | 10.13 | 86.20 | 96.33 | 195.71 | 44.04 | E |
| LYS | 392 | 18.83 | 160.20 | 179.02 | 217.63 | 73.61 | E |
| GLY | 393 | 46.51 | 15.41 | 61.92 | 30.80 | 50.03 | E |
| LYS | 394 | 5.28 | 37.72 | 43.00 | 217.63 | 17.33 | B |
| TYR | 395 | 15.71 | 24.41 | 40.12 | 232.25 | 10.51 | B |
| GLY | 396 | 6.12 | 2.98 | 9.09 | 30.80 | 9.66 | B |
| ILE | 397 | 0.00 | 3.32 | 3.32 | 187.72 | 1.77 | B |
| TYR | 398 | 0.00 | 6.22 | 6.22 | 232.25 | 2.68 | B |
| THR | 399 | 0.00 | 0.00 | 0.00 | 141.80 | 0.00 | B |
| LYS | 400 | 0.00 | 32.89 | 32.89 | 217.63 | 15.11 | B |
| VAL | 401 | 0.00 | 0.00 | 0.00 | 157.34 | 0.00 | B |
| SER | 402 | 0.00 | 10.50 | 10.50 | 104.76 | 10.03 | B |
| ARG | 403 | 16.40 | 77.09 | 93.49 | 249.57 | 30.89 | E |
| TYR | 404 | 0.00 | 0.94 | 0.94 | 232.25 | 0.41 | B |
| VAL | 405 | 0.82 | 0.86 | 1.68 | 157.34 | 0.55 | B |
| ASN | 406 | 1.90 | 94.81 | 96.71 | 152.56 | 62.15 | E |
| TRP | 407 | 3.71 | 52.87 | 56.58 | 267.74 | 19.75 | B |
| ILE | 408 | 0.00 | 0.08 | 0.08 | 187.72 | 0.04 | B |
| LYS | 409 | 1.34 | 104.52 | 105.87 | 217.63 | 48.03 | E |
| GLU | 410 | 4.61 | 86.16 | 90.77 | 168.29 | 51.20 | E |
| LYS | 411 | 5.92 | 54.20 | 60.12 | 217.63 | 24.90 | B |
| THR | 412 | 4.57 | 11.00 | 15.57 | 141.80 | 7.75 | B |
| LYS | 413 | 18.60 | 112.34 | 130.93 | 217.63 | 51.62 | E |
| LEU | 414 | 33.54 | 129.02 | 162.55 | 185.25 | 69.65 | E |
| THR | 415 | 42.16 | 44.61 | 86.77 | 141.80 | 31.46 | E |

Total area: 26818.00

The application's sequence listing, which the Patent Office published only in electronic form, follows.

SEQUENCE LISTING (306 sequences)

SEQ ID NO: 1 - protein, 35 aa, Homo sapiens
AETVFPDVDYVNSTEAETILDNITQSTQSFNDFTR

SEQ ID NO: 2 - protein, 470 aa, Artificial
  Human Factor IX with inserted activation peptide from mouse
MQRVNMIMAESPGLITICLLGYLLSAECTVFLDHENANKILNRPKRYNSGKLEEFVQGNLERECMEEKCSFEEAREVFENTERTTEFWKQYVDGDQCESNPCLNGGSCKDDINSYECWCPFGFEGKNCELDVTCNIKNGRCEQFCKNSADNKVVCSCTEGYRLAENQKSCEPAVPFPCGRVSVSQTSKLTRAETVFPDVDYVNSTEAETILDDITDGAILNNITQSTQSFNDFTRVVGGEDAKPGQFPWQVVLNGKVDAFCGGSIVNEKWIVTAAHCVETGVKITVVAGEHNIEETEHTEQKRNVIRIIPHHNYNAAINKYNHDIALLELDEPLVLNSYVTPICIADKEYTNIFLKFGSGYVSGWGRVFHKGRSALVLQYLRVPLVDRATCLRSTKFTIYNNMFCAGFHEGGRDSCQGDSGGPHVTEVEGTSFLTGIISWGEECAMKGKYGIYTKVSRYVNWIKEKTKLT

SEQ ID NO: 3 - protein, 470 aa, Artificial
  Human Factor IX with inserted activation peptide from mouse plus one glcosylation site
MQRVNMIMAESPGLITICLLGYLLSAECTVFLDHENANKILNRPKRYNSGKLEEFVQGNLERECMEEKCSFEEAREVFENTERTTEFWKQYVDGDQCESNPCLNGGSCKDDINSYECWCPFGFEGKNCELDVTCNIKNGRCEQFCKNSADNKVVCSCTEGYRLAENQKSCEPAVPFPCGRVSVSQTSKLTRAETVFPDVDYVNSTEAETILDNITDGAILNNITQSTQSFNDFTRVVGGEDAKPGQFPWQVVLNGKVDAFCGGSIVNEKWIVTAAHCVETGVKITVVAGEHNIEETEHTEQKRNVIRIIPHHNYNAAINKYNHDIALLELDEPLVLNSYVTPICIADKEYTNIFLKFGSGYVSGWGRVFHKGRSALVLQYLRVPLVDRATCLRSTKFTIYNNMFCAGFHEGGRDSCQGDSGGPHVTEVEGTSFLTGIISWGEECAMKGKYGIYTKVSRYVNWIKEKTKLT

SEQ ID NO: 4 - protein, 470 aa, Artificial
  Human Factor IX with inserted activation peptide from mouse plus two glycosylation sites
MQRVNMIMAESPGLITICLLGYLLSAECTVFLDHENANKILNRPKRYNSGKLEEFVQGNLERECMEEKCSFEEAREVFENTERTTEFWKQYVDGDQCESNPCLNGGSCKDDINSYECWCPFGFEGKNCELDVTCNIKNGRCEQFCKNSADNKVVCSCTEGYRLAENQKSCEPAVPFPCGRVSVSQTSKLTRAETVFPDVDYVNSTEAETILDNITDGNITNNITQSTQSFNDFTRVVGGEDAKPGQFPWQVVLNGKVDAFCGGSIVNEKWIVTAAHCVETGVKITVVAGEHNIEETEHTEQKRNVIRIIPHHNYNAAINKYNHDIALLELDEPLVLNSYVTPICIADKEYTNIFLKFGSGYVSGWGRVFHKGRSALVLQYLRVPLVDRATCLRSTKFTIYNNMFCAGFHEGGRDSCQGDSGGPHVTEVEGTSFLTGIISWGEECAMKGKYGIYTKVSRYVNWIKEKTKLT

SEQ ID NO: 5 - protein, 461 aa, Homo sapiens
MQRVNMIMAESPGLITICLLGYLLSAECTVFLDHENANKILNRPKRYNSGKLEEFVQGNLERECMEEKCSFEEAREVFENTERTTEFWKQYVDGDQCESNPCLNGGSCKDDINSYECWCPFGFEGKNCELDVTCNIKNGRCEQFCKNSADNKVVCSCTEGYRLAENQKSCEPAVPFPCGRVSVSQTSKLTRAETVFPDVDYVNSTEAETILDNITQSTQSFNDFTRVVGGEDAKPGQFPWQVVLNGKVDAFCGGSIVNEKWIVTAAHCVETGVKITVVAGEHNIEETEHTEQKRNVIRIIPHHNYNAAINKYNHDIALLELDEPLVLNSYVTPICIADKEYTNIFLKFGSGYVSGWGRVFHKGRSALVLQYLRVPLVDRATCLRSTKFTIYNNMFCAGFHEGGRDSCQGDSGGPHVTEVEGTSFLTGIISWGEECAMKGKYGIYTKVSRYVNWIKEKTKLT

SEQ ID NO: 6 - protein, 9 aa, Artificial
  Modified activation peptide for Factor IX
VFIQDNITD

SEQ ID NO: 7 - protein, 9 aa, Artificial
  Modified activation peptide for Factor IX
VFIQDNITN

SEQ ID NO: 8 - protein, 45 aa, Artificial
  Modified activation peptide for Factor IX
AETVFPDVDYVNSTENETIQDNITDNETILDNITQSTQSFNDFTR

SEQ ID NO: 9 - protein, 7 aa, Artificial
  Consensus sequence for O-linked glycosylation
  misc_feature (2)..(3): Xaa can be any naturally occurring amino acid
  misc_feature (6)..(6): Xaa can be Thr or Ser
CXXGGXC

SEQ ID NO: 10 - protein, 5 aa, Artificial
  Putative O-linked glycosylation site
  misc_feature (4)..(4): Xaa can be Glu or Asp
NSTXA

SEQ ID NO: 11 - protein, 5 aa, Artificial
  Putative O-linked glycosylation site
NITQS

SEQ ID NO: 12 - protein, 5 aa, Artificial
  Putative O-linked glycosylation site
QSTQS

SEQ ID NO: 13 - protein, 5 aa, Artificial
  Putative O-linked glycosylation site
  misc_feature (1)..(1): Xaa can be Asp or Glu
  misc_feature (4)..(4): Xaa can be Arg or Lys
XFTXV

SEQ ID NO: 14 - protein, 4 aa, Artificial
  Putative O-linked glycosylation site
  misc_feature (2)..(2): Xaa can be Asp or Glu
CXSN

SEQ ID NO: 15 - protein, 5 aa, Artificial
  Putative O-linked glycosylation site
  misc_feature (5)..(5): Xaa can be Arg or Lys
GGSCX

SEQ ID NO: 16 - protein, 452 aa, Canis lupus familiaris
MAEASGLVTVCLLGYLLSAECAVFLDRENATKILSRPKRYNSGKLEEFVRGNLERECIEEKCSFEEAREVFENTEKTTEFWKQYVDGDQCESNPCLNDGVCKDDINSYECWCRAGFEGKNCELDVTCNIKNGRCKQFCKLGPDNKVVCSCTTGYQLAEDQRSCEPAVPFPCGRVSVPHISMTRTRAETLFSNMDYENSTEVEKILDNVTQPLNDFTRVVGGKDAKPGQFPWQVLLNGKVDAFCGGSIINEKWVVTAAHCIEPDVKITIVAGEHNTEKREHTEQKRNVIRTILHHSYNATINKYNHDIALLELDEPLTLNSYVTPICIADREYSNIFLKFGSGYVSGWGRVFNKGRSASILQYLKVPLVDRATCLRSTKFTIYNNMFCAGFHEGGKDSCQGDSGGPHVTEVEGISFLTGIISWGEECAMKGKYGIYTKVSRYVNWIKEKTKLT

SEQ ID NO: 17 - protein, 409 aa, Sus scrofa
YNSGKLEESFVRGNLERECIEEKCSFEEAREVFENTEKTNEFWKQYVDGDQCEPNPCLNGGLCKDDINSYECWCQVGFEGKNCELDATCNIKNGRCKQFCKTGADSKVLCSCTTGYRLAPDQKSCKPAVPFPCGRVSVSHSPTTLTRAEIIFSNMDYENSTEVEPILDSLTESNQSSDDFIRIVGGENAKPGQFPWQVLLNGKIDAFCGGSIINEKWVVTAAHCIEPGVKITVVAGEYNTEETEPTEQRRNVIRAIPHHSYNATVNKYSHDIALLELDEPLTLNSYVTPICIADKEYTNIFLKFGSGYVSGWGRVFNRGRSATILQYLKVPLVDRATCLRSTKVTIYSNMFCAGFHEGGKDSCLGDSGGPHVTEVEGTSFLTGIISWGEECAVKGKYGIYTKVSRYVNW

SEQ ID NO: 18 - protein, 416 aa, Bos taurus
YNSGKLEEFVRGNLERECKEEKCSFEEAREVFENTEKTTEFWKQYVDGDQCESNPCLNGGMCKDDINSYECWCQAGFEGTNCELDATCSIKNGRCKQFCKRDTDNKVVCSCTDGYRLAEDQKSCEPAVPFPCGRVSVSHISKKLTRAETIFSNTNYENSSEAEIIWDNVTQSNQSFDEFSRVVGGEDAERGQFPWQVLLHGEIAAFCGGSIVNEKWVVTAAHCIKPGVKITVVAGEHNTEKPEPTEQKRNVIRAIPYHSYNASINKYSHDIALLELDEPLELNSYVTPICIADRDYTNIFSKFGYGYVSGWGKVFNRGRSASILQYLKVPLVDRATCLRSTKFSIYSHMFCAGYHEGGKDSCQGDSGGPHVTEVEGTSFLTGIISWGEECAMKGKYGIYTKVSRYVNWIKEKTKLT

SEQ ID NO: 19 - protein, 471 aa, Mus musculus
MKHLNTVMAESPALITIFLLGYLLSTECAVFLDRENATKILTRPKRYNSGKLEEFVRGNLERECIEERCSFEEAREVFENTEKTTEFWKQYVDGDQCESNPCLNGGICKDDISSYECWCQVGFEGRNCELDATCNIKNGRCKQFCKNSPDNKVICSCTEGYQLAEDQKSCEPTVPFPCGRASISYSSKKITRAETVFSNMDYENSTEAVFIQDDITDGAILNNVTESSESLNDFTRVVGGENAKPGQIPWQVILNGEIEAFCGGAIINEKWIVTAAHCLKPGDKIEVVAGEYNIDKKEDTEQRRNVIRTIPHHQYNATINKYSHDIALLELDKPLILNSYVTPICVANREYTNIFLKFGSGYVSGWGKVFNKGRQASILQYLRVPLVDRATCLRSTTFTIYNNMFCAGYREGGKDSCEGDSGGPHVTEVEGTSFLTGIISWGEECAMKGKYGIYTKVSRYVNWIKEKTKLT

SEQ ID NO: 20 - protein, 34 aa, Bos taurus
AETIFSNTNYENSSEAEIIWDNVTQSNQSFDEFS

SEQ ID NO: 21 - protein, 34 aa, Ovis aries
AETIFSNMNYENSSEAEIIWDNVTQSNQSFDDFN

SEQ ID NO: 22 - protein, 29 aa, Equus caballus
AETIFSNMNYENSTEAETIWDNITEFDLN

SEQ ID NO: 23 - protein, 31 aa, Canis lupus familiarus
AETLFSNMDYENSTEVEKILDNVTQPLNDFT

SEQ ID NO: 24 - protein, 38 aa, Felix silvestris catus
AETLFLNMDYENSTTDYENSAEAEKNVDNVTQPLNDLT

SEQ ID NO: 25 - protein, 41 aa, Rattus norvegicus
AETVFSNTDYGNSTELILDDITNSTILDNLTENSEPINDFT

SEQ ID NO: 26 - protein, 43 aa, Mus musculus
AETVFSNMDYENSTEAVFIQDDITDGAILNNVTESSESLNDFT

SEQ ID NO: 27 - protein, 34 aa, Homo sapiens
AETVFPDVDYVNSTEAETILDNITQSTQSFNDFT

SEQ ID NO: 28 - protein, 34 aa, Sus scrofa
AEIIFSNMDYENSTEVEPILDSLTESNQSSDDFI

SEQ ID NO: 29 - protein, 34 aa, Oryctolagus cuniculus
ATTIFSNTEYENFTEAETIRGNVTQRSQSSDDFT

SEQ ID NO: 30 - protein, 34 aa, Oryctolagus cuniculus; identical to SEQ ID NO: 29

SEQ ID NO: 31 - protein, 45 aa, Cavia porcellus
ANAIFSRMGYVNFTDDETIWDDNDDDETIWDNSTESTKPSDEFFR

SEQ ID NO: 32 - protein, 34 aa, Artificial; identical to SEQ ID NO: 27
  Consensus sequence for Factor IX activation peptide

SEQ ID NO: 33 - protein, 415 aa, Homo sapiens
YNSGKLEEFVQGNLERECMEEKCSFEEAREVFENTERTTEFWKQYVDGDQCESNPCLNGGSCKDDINSYECWCPFGFEGKNCELDVTCNIKNGRCEQFCKNSADNKVVCSCTEGYRLAENQKSCEPAVPFPCGRVSVSQTSKLTRAETVFPDVDYVNSTEAETILDNITQSTQSFNDFTRVVGGEDAKPGQFPWQVVLNGKVDAFCGGSIVNEKWIVTAAHCVETGVKITVVAGEHNIEETEHTEQKRNVIRIIPHHNYNAAINKYNHDIALLELDEPLVLNSYVTPICIADKEYTNIFLKFGSGYVSGWGRVFHKGRSALVLQYLRVPLVDRATCLRSTKFTIYNNMFCAGFHEGGRDSCQGDSGGPHVTEVEGTSFLTGIISWGEECAMKGKYGIYTKVSRYVNWIKEKTKLT

SEQ ID NO: 34 - protein, 415 aa, Artificial
  Human Factor IX variant with extra N-linked glycan attachment site inserted in the activation peptide
  misc_feature (149)..(149): Xaa can be Ser or Thr
YNSGKLEEFVQGNLERECMEEKCSFEEAREVFENTERTTEFWKQYVDGDQCESNPCLNGGSCKDDINSYECWCPFGFEGKNCELDVTCNIKNGRCEQFCKNSADNKVVCSCTEGYRLAENQKSCEPAVPFPCGRVSVSQTSKLTRANTXFPDVDYVNSTEAETILDNITQSTQSFNDFTRVVGGEDAKPGQFPWQVVLNGKVDAFCGGSIVNEKWIVTAAHCVETGVKITVVAGEHNIEETEHTEQKRNVIRIIPHHNYNAAINKYNHDIALLELDEPLVLNSYVTPICIADKEYTNIFLKFGSGYVSGWGRVFHKGRSALVLQYLRVPLVDRATCLRSTKFTIYNNMFCAGFHEGGRDSCQGDSGGPHVTEVEGTSFLTGIISWGEECAMKGKYGIYTKVSRYVNWIKEKTKLT

SEQ ID NO: 35 - protein, 415 aa, Artificial
  Human Factor IX variant with extra N-linked glycan attachment site inserted in the activation peptide
  misc_feature (150)..(150): Xaa can be Ser or Thr
YNSGKLEEFVQGNLERECMEEKCSFEEAREVFENTERTTEFWKQYVDGDQCESNPCLNGGSCKDDINSYECWCPFGFEGKNCELDVTCNIKNGRCEQFCKNSADNKVVCSCTEGYRLAENQKSCEPAVPFPCGRVSVSQTSKLTRAENVXPDVDYVNSTEAETILDNITQSTQSFNDFTRVVGGEDAKPGQFPWQVVLNGKVDAFCGGSIVNEKWIVTAAHCVETGVKITVVAGEHNIEETEHTEQKRNVIRIIPHHNYNAAINKYNHDIALLELDEPLVLNSYVTPICIADKEYTNIFLKFGSGYVSGWGRVFHKGRSALVLQYLRVPLVDRATCLRSTKFTIYNNMFCAGFHEGGRDSCQGDSGGPHVTEVEGTSFLTGIISWGEECAMKGKYGIYTKVSRYVNWIKEKTKLT

SEQ ID NO: 36 - protein, 415 aa, Artificial
  Human Factor IX variant with extra N-linked glycan attachment site inserted in the activation peptide
  misc_feature (153)..(153): Xaa can be Ser or Thr
YNSGKLEEFVQGNLERECMEEKCSFEEAREVFENTERTTEFWKQYVDGDQCESNPCLNGGSCKDDINSYECWCPFGFEGKNCELDVTCNIKNGRCEQFCKNSADNKVVCSCTEGYRLAENQKSCEPAVPFPCGRVSVSQTSKLTRAETVFNDXDYVNSTEAETILDNITQSTQSFNDFTRVVGGEDAKPGQFPWQVVLNGKVDAFCGGSIVNEKWIVTAAHCVETGVKITVVAGEHNIEETEHTEQKRNVIRIIPHHNYNAAINKYNHDIALLELDEPLVLNSYVTPICIADKEYTNIFLKFGSGYVSGWGRVFHKGRSALVLQYLRVPLVDRATCLRSTKFTIYNNMFCAGFHEGGRDSCQGDSGGPHVTEVEGTSFLTGIISWGEECAMKGKYGIYTKVSRYVNWIKEKTKLT

SEQ ID NO: 37 - protein, 415 aa, Artificial
  Human Factor IX variant with extra N-linked glycan attachment site inserted in the activation peptide
  misc_feature (155)..(155): Xaa can be Ser or Thr
YNSGKLEEFVQGNLERECMEEKCSFEEAREVFENTERTTEFWKQYVDGDQCESNPCLNGGSCKDDINSYECWCPFGFEGKNCELDVTCNIKNGRCEQFCKNSADNKVVCSCTEGYRLAENQKSCEPAVPFPCGRVSVSQTSKLTRAETVFPDNDXVNSTEAETILDNITQSTQSFNDFTRVVGGEDAKPGQFPWQVVLNGKVDAFCGGSIVNEKWIVTAAHCVETGVKITVVAGEHNIEETEHTEQKRNVIRIIPHHNYNAAINKYNHDIALLELDEPLVLNSYVTPICIADKEYTNIFLKFGSGYVSGWGRVFHKGRSALVLQYLRVPLVDRATCLRSTKFTIYNNMFCAGFHEGGRDSCQGDSGGPHVTEVEGTSFLTGIISWGEECAMKGKYGIYTKVSRYVNWIKEKTKLT

SEQ ID NO: 38 - protein, 415 aa, Artificial
  Human Factor IX variant with extra N-linked glycan attachment site inserted in the activation peptide
  misc_feature (156)..(156): Xaa can be Ser or Thr
YNSGKLEEFVQGNLERECMEEKCSFEEAREVFENTERTTEFWKQYVDGDQCESNPCLNGGSCKDDINSYECWCPFGFEGKNCELDVTCNIKNGRCEQFCKNSADNKVVCSCTEGYRLAENQKSCEPAVPFPCGRVSVSQTSKLTRAETVFPDVNYXNSTEAETILDNITQSTQSFNDFTRVVGGEDAKPGQFPWQVVLNGKVDAFCGGSIVNEKWIVTAAHCVETGVKITVVAGEHNIEETEHTEQKRNVIRIIPHHNYNAAINKYNHDIALLELDEPLVLNSYVTPICIADKEYTNIFLKFGSGYVSGWGRVFHKGRSALVLQYLRVPLVDRATCLRSTKFTIYNNMFCAGFHEGGRDSCQGDSGGPHVTEVEGTSFLTGIISWGEECAMKGKYGIYTKVSRYVNWIKEKTKLT

SEQ ID NO: 39 - protein, 415 aa, Artificial
  Human Factor IX variant with extra N-linked glycan attachment site inserted in the activation peptide
  misc_feature (157)..(157): Xaa can be Ser or Thr
YNSGKLEEFVQGNLERECMEEKCSFEEAREVFENTERTTEFWKQYVDGDQCESNPCLNGGSCKDDINSYECWCPFGFEGKNCELDVTCNIKNGRCEQFCKNSADNKVVCSCTEGYRLAENQKSCEPAVPFPCGRVSVSQTSKLTRAETVFPDVDNVXSTEAETILDNITQSTQSFNDFTRVVGGEDAKPGQFPWQVVLNGKVDAFCGGSIVNEKWIVTAAHCVETGVKITVVAGEHNIEETEHTEQKRNVIRIIPHHNYNAAINKYNHDIALLELDEPLVLNSYVTPICIADKEYTNIFLKFGSGYVSGWGRVFHKGRSALVLQYLRVPLVDRATCLRSTKFTIYNNMFCAGFHEGGRDSCQGDSGGPHVTEVEGTSFLTGIISWGEECAMKGKYGIYTKVSRYVNWIKEKTKLT

SEQ ID NO: 40 - protein, 415 aa, Artificial
  Human Factor IX variant with extra N-linked glycan attachment site inserted in the activation peptide
  misc_feature (158)..(158): Xaa can be Ser or Thr
YNSGKLEEFVQGNLERECMEEKCSFEEAREVFENTERTTEFWKQYVDGDQCESNPCLNGGSCKDDINSYECWCPFGFEGKNCELDVTCNIKNGRCEQFCKNSADNKVVCSCTEGYRLAENQKSCEPAVPFPCGRVSVSQTSKLTRAETVFPDVDYNNXTEAETILDNITQSTQSFNDFTRVVGGEDAKPGQFPWQVVLNGKVDAFCGGSIVNEKWIVTAAHCVETGVKITVVAGEHNIEETEHTEQKRNVIRIIPHHNYNAAINKYNHDIALLELDEPLVLNSYVTPICIADKEYTNIFLKFGSGYVSGWGRVFHKGRSALVLQYLRVPLVDRATCLRSTKFTIYNNMFCAGFHEGGRDSCQGDSGGPHVTEVEGTSFLTGIISWGEECAMKGKYGIYTKVSRYVNWIKEKTKLT

SEQ ID NO: 41 - protein, 415 aa, Artificial
  Human Factor IX variant with extra N-linked glycan attachment site inserted in the activation peptide
  misc_feature (159)..(159): Xaa can be Ser or Thr
YNSGKLEEFVQGNLERECMEEKCSFEEAREVFENTERTTEFWKQYVDGDQCESNPCLNGGSCKDDINSYECWCPFGFEGKNCELDVTCNIKNGRCEQFCKNSADNKVVCSCTEGYRLAENQKSCEPAVPFPCGRVSVSQTSKLTRAETVFPDVDYVNSXEAETILDNITQSTQSFNDFTRVVGGEDAKPGQFPWQVVLNGKVDAFCGGSIVNEKWIVTAAHCVETGVKITVVAGEHNIEETEHTEQKRNVIRIIPHHNYNAAINKYNHDIALLELDEPLVLNSYVTPICIADKEYTNIFLKFGSGYVSGWGRVFHKGRSALVLQYLRVPLVDRATCLRSTKFTIYNNMFCAGFHEGGRDSCQGDSGGPHVTEVEGTSFLTGIISWGEECAMKGKYGIYTKVSRYVNWIKEKTKLT

SEQ ID NO: 42 - protein, 415 aa, Artificial
  Human Factor IX variant with extra N-linked glycan attachment site inserted in the activation peptide
  misc_feature (160)..(160): Xaa can be Ser or Thr
YNSGKLEEFVQGNLERECMEEKCSFEEAREVFENTERTTEFWKQYVDGDQCESNPCLNGGSCKDDINSYECWCPFGFEGKNCELDVTCNIKNGRCEQFCKNSADNKVVCSCTEGYRLAENQKSCEPAVPFPCGRVSVSQTSKLTRAETVFPDVDYVNNTXAETILDNITQSTQSFNDFTRVVGGEDAKPGQFPWQVVLNGKVDAFCGGSIVNEKWIVTAAHCVETGVKITVVAGEHNIEETEHTEQKRNVIRIIPHHNYNAAINKYNHDIALLELDEPLVLNSYVTPICIADKEYTNIFLKFGSGYVSGWGRVFHKGRSALVLQYLRVPLVDRATCLRSTKFTIYNNMFCAGFHEGGRDSCQGDSGGPHVTEVEGTSFLTGIISWGEECAMKGKYGIYTKVSRYVNWIKEKTKLT

SEQ ID NO: 43 - protein, 415 aa, Artificial
  Human Factor IX variant with extra N-linked glycan attachment site inserted in the activation peptide
  misc_feature (161)..(161): Xaa can be Ser or Thr
YNSGKLEEFVQGNLERECMEEKCSFEEAREVFENTERTTEFWKQYVDGDQCESNPCLNGGSCKDDINSYECWCPFGFEGKNCELDVTCNIKNGRCEQFCKNSADNKVVCSCTEGYRLAENQKSCEPAVPFPCGRVSVSQTSKLTRAETVFPDVDYVNSNEXETILDNITQSTQSFNDFTRVVGGEDAKPGQFPWQVVLNGKVDAFCGGSIVNEKWIVTAAHCVETGVKITVVAGEHNIEETEHTEQKRNVIRIIPHHNYNAAINKYNHDIALLELDEPLVLNSYVTPICIADKEYTNIFLKFGSGYVSGWGRVFHKGRSALVLQYLRVPLVDRATCLRSTKFTIYNNMFCAGFHEGGRDSCQGDSGGPHVTEVEGTSFLTGIISWGEECAMKGKYGIYTKVSRYVNWIKEKTKLT

SEQ ID NO: 44 - protein, 415 aa, Artificial
  Human Factor IX variant with extra N-linked glycan attachment site inserted in the activation peptide
  misc_feature (162)..(162): Xaa can be Ser or Thr
YNSGKLEEFVQGNLERECMEEKCSFEEAREVFENTERTTEFWKQYVDGDQCESNPCLNGGSCKDDINSYECWCPFGFEGKNCELDVTCNIKNGRCEQFCKNSADNKVVCSCTEGYRLAENQKSCEPAVPFPCGRVSVSQTSKLTRAETVFPDVDYVNSTNAXTILDNITQSTQSFNDFTRVVGGEDAKPGQFPWQVVLNGKVDAFCGGSIVNEKWIVTAAHCVETGVKITVVAGEHNIEETEHTEQKRNVIRIIPHHNYNAAINKYNHDIALLELDEPLVLNSYVTPICIADKEYTNIFLKFGSGYVSGWGRVFHKGRSALVLQYLRVPLVDRATCLRSTKFTIYNNMFCAGFHEGGRDSCQGDSGGPHVTEVEGTSFLTGIISWGEECAMKGKYGIYTKVSRYVNWIKEKTKLT

SEQ ID NO: 45 - protein, 415 aa, Artificial
  Human Factor IX variant with extra N-linked glycan attachment site inserted in the activation peptide
  misc_feature (163)..(163): Xaa can be Ser or Thr
YNSGKLEEFVQGNLERECMEEKCSFEEAREVFENTERTTEFWKQYVDGDQCESNPCLNGGSCKDDINSYECWCPFGFEGKNCELDVTCNIKNGRCEQFCKNSADNKVVCSCTEGYRLAENQKSCEPAVPFPCGRVSVSQTSKLTRAETVFPDVDYVNSTENEXILDNITQSTQSFNDFTRVVGGEDAKPGQFPWQVVLNGKVDAFCGGSIVNEKWIVTAAHCVETGVKITVVAGEHNIEETEHTEQKRNVIRIIPHHNYNAAINKYNHDIALLELDEPLVLNSYVTPICIADKEYTNIFLKFGSGYVSGWGRVFHKGRSALVLQYLRVPLVDRATCLRSTKFTIYNNMFCAGFHEGGRDSCQGDSGGPHVTEVEGTSFLTGIISWGEECAMKGKYGIYTKVSRYVNWIKEKTKLT

SEQ ID NO: 46 - protein, 415 aa, Artificial
  Human Factor IX variant with extra N-linked glycan attachment site inserted in the activation peptide
  misc_feature (164)..(164): Xaa can be Ser or Thr
YNSGKLEEFVQGNLERECMEEKCSFEEAREVFENTERTTEFWKQYVDGDQCESNPCLNGGSCKDDINSYECWCPFGFEGKNCELDVTCNIKNGRCEQFCKNSADNKVVCSCTEGYRLAENQKSCEPAVPFPCGRVSVSQTSKLTRAETVFPDVDYVNSTEANTXLDNITQSTQSFNDFTRVVGGEDAKPGQFPWQVVLNGKVDAFCGGSIVNEKWIVTAAHCVETGVKITVVAGEHNIEETEHTEQKRNVIRIIPHHNYNAAINKYNHDIALLELDEPLVLNSYVTPICIADKEYTNIFLKFGSGYVSGWGRVFHKGRSALVLQYLRVPLVDRATCLRSTKFTIYNNMFCAGFHEGGRDSCQGDSGGPHVTEVEGTSFLTGIISWGEECAMKGKYGIYTKVSRYVNWIKEKTKLT

SEQ ID NO: 47 - protein, 415 aa, Artificial
  Human Factor IX variant with extra N-linked glycan attachment site inserted in the activation peptide
  misc_feature (165)..(165): Xaa can be Ser or Thr
YNSGKLEEFVQGNLERECMEEKCSFEEAREVFENTERTTEFWKQYVDGDQCESNPCLNGGSCKDDINSYECWCPFGFEGKNCELDVTCNIKNGRCEQFCKNSADNKVVCSCTEGYRLAENQKSCEPAVPFPCGRVSVSQTSKLTRAETVFPDVDYVNSTEAENIXDNITQSTQSFNDFTRVVGGEDAKPGQFPWQVVLNGKVDAFCGGSIVNEKWIVTAAHCVETGVKITVVAGEHNIEETEHTEQKRNVIRIIPHHNYNAAINKYNHDIALLELDEPLVLNSYVTPICIADKEYTNIFLKFGSGYVSGWGRVFHKGRSALVLQYLRVPLVDRATCLRSTKFTIYNNMFCAGFHEGGRDSCQGDSGGPHVTEVEGTSFLTGIISWGEECAMKGKYGIYTKVSRYVNWIKEKTKLT

SEQ ID NO: 48 - protein, 415 aa, Artificial
  Human Factor IX variant with extra N-linked glycan attachment site inserted in the activation peptide
  misc_feature (166)..(166): Xaa can be Ser or Thr
YNSGKLEEFVQGNLERECMEEKCSFEEAREVFENTERTTEFWKQYVDGDQCESNPCLNGGSCKDDINSYECWCPFGFEGKNCELDVTCNIKNGRCEQFCKNSADNKVVCSCTEGYRLAENQKSCEPAVPFPCGRVSVSQTSKLTRAETVFPDVDYVNSTEAETNLXNITQSTQSFNDFTRVVGGEDAKPGQFPWQVVLNGKVDAFCGGSIVNEKWIVTAAHCVETGVKITVVAGEHNIEETEHTEQKRNVIRIIPHHNYNAAINKYNHDIALLELDEPLVLNSYVTPICIADKEYTNIFLKFGSGYVSGWGRVFHKGRSALVLQYLRVPLVDRATCLRSTKFTIYNNMFCAGFHEGGRDSCQGDSGGPHVTEVEGTSFLTGIISWGEECAMKGKYGIYTKVSRYVNWIKEKTKLT

SEQ ID NO: 49 - protein, 415 aa, Artificial
  Human Factor IX variant with extra N-linked glycan attachment site inserted in the activation peptide
  misc_feature (168)..(168): Xaa can be Ser or Thr
YNSGKLEEFVQGNLERECMEEKCSFEEAREVFENTERTTEFWKQYVDGDQCESNPCLNGGSCKDDINSYECWCPFGFEGKNCELDVTCNIKNGRCEQFCKNSADNKVVCSCTEGYRLAENQKSCEPAVPFPCGRVSVSQTSKLTRAETVFPDVDYVNSTEAETILNNXTQSTQSFNDFTRVVGGEDAKPGQFPWQVVLNGKVDAFCGGSIVNEKWIVTAAHCVETGVKITVVAGEHNIEETEHTEQKRNVIRIIPHHNYNAAINKYNHDIALLELDEPLVLNSYVTPICIADKEYTNIFLKFGSGYVSGWGRVFHKGRSALVLQYLRVPLVDRATCLRSTKFTIYNNMFCAGFHEGGRDSCQGDSGGPHVTEVEGTSFLTGIISWGEECAMKGKYGIYTKVSRYVNWIKEKTKLT

SEQ ID NO: 50 - protein, 415 aa, Artificial
  Human Factor IX variant with extra N-linked glycan attachment site inserted in the activation peptide
  misc_feature (170)..(170): Xaa can be Ser or Thr
YNSGKLEEFVQGNLERECMEEKCSFEEAREVFENTERTTEFWKQYVDGDQCESNPCLNGGSCKDDINSYECWCPFGFEGKNCELDVTCNIKNGRCEQFCKNSADNKVVCSCTEGYRLAENQKSCEPAVPFPCGRVSVSQTSKLTRAETVFPDVDYVNSTEAETILDNNTXSTQSFNDFTRVVGGEDAKPGQFPWQVVLNGKVDAFCGGSIVNEKWIVTAAHCVETGVKITVVAGEHNIEETEHTEQKRNVIRIIPHHNYNAAINKYNHDIALLELDEPLVLNSYVTPICIADKEYTNIFLKFGSGYVSGWGRVFHKGRSALVLQYLRVPLVDRATCLRSTKFTIYNNMFCAGFHEGGRDSCQGDSGGPHVTEVEGTSFLTGIISWGEECAMKGKYGIYTKVSRYVNWIKEKTKLT

SEQ ID NO: 51 - protein, 415 aa, Artificial
  Human Factor IX variant with extra N-linked glycan attachment site inserted in the activation peptide
  misc_feature (172)..(172): Xaa can be Ser or Thr
YNSGKLEEFVQGNLERECMEEKCSFEEAREVFENTERTTEFWKQYVDGDQCESNPCLNGGSCKDDINSYECWCPFGFEGKNCELDVTCNIKNGRCEQFCKNSADNKVVCSCTEGYRLAENQKSCEPAVPFPCGRVSVSQTSKLTRAETVFPDVDYVNSTEAETILDNITNSXQSFNDFTRVVGGEDAKPGQFPWQVVLNGKVDAFCGGSIVNEKWIVTAAHCVETGVKITVVAGEHNIEETEHTEQKRNVIRIIPHHNYNAAINKYNHDIALLELDEPLVLNSYVTPICIADKEYTNIFLKFGSGYVSGWGRVFHKGRSALVLQYLRVPLVDRATCLRSTKFTIYNNMFCAGFHEGGRDSCQGDSGGPHVTEVEGTSFLTGIISWGEECAMKGKYGIYTKVSRYVNWIKEKTKLT

SEQ ID NO: 52 - protein, 415 aa, Artificial
  Human Factor IX variant with extra N-linked glycan attachment site inserted in the activation peptide
  misc_feature (173)..(173): Xaa can be Ser or Thr
YNSGKLEEFVQGNLERECMEEKCSFEEAREVFENTERTTEFWKQYVDGDQCESNPCLNGGSCKDDINSYECWCPFGFEGKNCELDVTCNIKNGRCEQFCKNSADNKVVCSCTEGYRLAENQKSCEPAVPFPCGRVSVSQTSKLTRAETVFPDVDYVNSTEAETILDNITQNTXSFNDFTRVVGGEDAKPGQFPWQVVLNGKVDAFCGGSIVNEKWIVTAAHCVETGVKITVVAGEHNIEETEHTEQKRNVIRIIPHHNYNAAINKYNHDIALLELDEPLVLNSYVTPICIADKEYTNIFLKFGSGYVSGWGRVFHKGRSALVLQYLRVPLVDRATCLRSTKFTIYNNMFCAGFHEGGRDSCQGDSGGPHVTEVEGTSFLTGIISWGEECAMKGKYGIYTKVSRYVNWIKEKTKLT

SEQ ID NO: 53 - protein, 415 aa, Artificial
  Human Factor IX variant with extra N-linked glycan attachment site inserted in the activation peptide
  misc_feature (174)..(174): Xaa can be Ser or Thr
YNSGKLEEFVQGNLERECMEEKCSFEEAREVFENTERTTEFWKQYVDGDQCESNPCLNGGSCKDDINSYECWCPFGFEGKNCELDVTCNIKNGRCEQFCKNSADNKVVCSCTEGYRLAENQKSCEPAVPFPCGRVSVSQTSKLTRAETVFPDVDYVNSTEAETILDNITQSNQXFNDFTRVVGGEDAKPGQFPWQVVLNGKVDAFCGGSIVNEKWIVTAAHCVETGVKITVVAGEHNIEETEHTEQKRNVIRIIPHHNYNAAINKYNHDIALLELDEPLVLNSYVTPICIADKEYTNIFLKFGSGYVSGWGRVFHKGRSALVLQYLRVPLVDRATCLRSTKFTIYNNMFCAGFHEGGRDSCQGDSGGPHVTEVEGTSFLTGIISWGEECAMKGKYGIYTKVSRYVNWIKEKTKLT

SEQ ID NO: 54 - protein, 415 aa, Artificial
  Human Factor IX variant with extra N-linked glycan attachment site inserted in the activation peptide
  misc_feature (175)..(175): Xaa can be Ser or Thr
YNSGKLEEFVQGNLERECMEEKCSFEEAREVFENTERTTEFWKQYVDGDQCESNPCLNGGSCKDDINSYECWCPFGFEGKNCELDVTCNIKNGRCEQFCKNSADNKVVCSCTEGYRLAENQKSCEPAVPFPCGRVSVSQTSKLTRAETVFPDVDYVNSTEAETILDNITQSTNSXNDFTRVVGGEDAKPGQFPWQVVLNGKVDAFCGGSIVNEKWIVTAAHCVETGVKITVVAGEHNIEETEHTEQKRNVIRIIPHHNYNAAINKYNHDIALLELDEPLVLNSYVTPICIADKEYTNIFLKFGSGYVSGWGRVFHKGRSALVLQYLRVPLVDRATCLRSTKFTIYNNMFCAGFHEGGRDSCQGDSGGPHVTEVEGTSFLTGIISWGEECAMKGKYGIYTKVSRYVNWIKEKTKLT

SEQ ID NO: 55 - protein, 415 aa, Artificial
  Human Factor IX variant with extra N-linked glycan attachment site inserted in the activation peptide
  misc_feature (176)..(176): Xaa can be Ser or Thr
YNSGKLEEFVQGNLERECMEEKCSFEEAREVFENTERTTEFWKQYVDGDQCESNPCLNGGSCKDDINSYECWCPFGFEGKNCELDVTCNIKNGRCEQFCKNSADNKVVCSCTEGYRLAENQKSCEPAVPFPCGRVSVSQTSKLTRAETVFPDVDYVNSTEAETILDNITQSTQNFXDFTRVVGGEDAKPGQFPWQVVLNGKVDAFCGGSIVNEKWIVTAAHCVETGVKITVVAGEHNIEETEHTEQKRNVIRIIPHHNYNAAINKYNHDIALLELDEPLVLNSYVTPICIADKEYTNIFLKFGSGYVSGWGRVFHKGRSALVLQYLRVPLVDRATCLRSTKFTIYNNMFCAGFHEGGRDSCQGDSGGPHVTEVEGTSFLTGIISWGEECAMKGKYGIYTKVSRYVNWIKEKTKLT

SEQ ID NO: 56 - protein, 415 aa, Artificial
  Human Factor IX variant with extra N-linked glycan attachment site inserted in the activation peptide
  misc_feature (177)..(177): Xaa can be Ser or Thr
YNSGKLEEFVQGNLERECMEEKCSFEEAREVFENTERTTEFWKQYVDGDQCESNPCLNGGSCKDDINSYECWCPFGFEGKNCELDVTCNIKNGRCEQFCKNSADNKVVCSCTEGYRLAENQKSCEPAVPFPCGRVSVSQTSKLTRAETVFPDVDYVNSTEAETILDNITQSTQSNNXFTRVVGGEDAKPGQFPWQVVLNGKVDAFCGGSIVNEKWIVTAAHCVETGVKITVVAGEHNIEETEHTEQKRNVIRIIPHHNYNAAINKYNHDIALLELDEPLVLNSYVTPICIADKEYTNIFLKFGSGYVSGWGRVFHKGRSALVLQYLRVPLVDRATCLRSTKFTIYNNMFCAGFHEGGRDSCQGDSGGPHVTEVEGTSFLTGIISWGEECAMKGKYGIYTKVSRYVNWIKEKTKLT

SEQ ID NO: 57 - protein, 415 aa, Artificial
  Human Factor IX variant with extra N-linked glycan attachment site inserted in the activation peptide
  misc_feature (178)..(178): Xaa can be Ser or Thr
YNSGKLEEFVQGNLERECMEEKCSFEEAREVFENTERTTEFWKQYVDGDQCESNPCLNGGSCKDDINSYECWCPFGFEGKNCELDVTCNIKNGRCEQFCKNSADNKVVCSCTEGYRLAENQKSCEPAVPFPCGRVSVSQTSKLTRAETVFPDVDYVNSTEAETILDNITQSTQSFNDXTRVVGGEDAKPGQFPWQVVLNGKVDAFCGGSIVNEKWIVTAAHCVETGVKITVVAGEHNIEETEHTEQKRNVIRIIPHHNYNAAINKYNHDIALLELDEPLVLNSYVTPICIADKEYTNIFLKFGSGYVSGWGRVFHKGRSALVLQYLRVPLVDRATCLRSTKFTIYNNMFCAGFHEGGRDSCQGDSGGPHVTEVEGTSFLTGIISWGEECAMKGKYGIYTKVSRYVNWIKEKTKLT

SEQ ID NO: 58 - protein, 415 aa, Artificial
  Human Factor IX variant with extra N-linked glycan attachment site inserted in the activation peptide
  misc_feature (179)..(179): Xaa can be Ser or Thr
YNSGKLEEFVQGNLERECMEEKCSFEEAREVFENTERTTEFWKQYVDGDQCESNPCLNGGSCKDDINSYECWCPFGFEGKNCELDVTCNIKNGRCEQFCKNSADNKVVCSCTEGYRLAENQKSCEPAVPFPCGRVSVSQTSKLTRAETVFPDVDYVNSTEAETILDNITQSTQSFNNFXRVVGGEDAKPGQFPWQVVLNGKVDAFCGGSIVNEKWIVTAAHCVETGVKITVVAGEHNIEETEHTEQKRNVIRIIPHHNYNAAINKYNHDIALLELDEPLVLNSYVTPICIADKEYTNIFLKFGSGYVSGWGRVFHKGRSALVLQYLRVPLVDRATCLRSTKFTIYNNMFCAGFHEGGRDSCQGDSGGPHVTEVEGTSFLTGIISWGEECAMKGKYGIYTKVSRYVNWIKEKTKLT

SEQ ID NO: 59 - protein, 424 aa, Artificial
  Human Factor IX variant with one or more additional N-linked glycan attachment consensus sequences inserted in the activation peptide
YNSGKLEEFVQGNLERECMEEKCSFEEAREVFENTERTTEFWKQYVDGDQCESNPCLNGGSCKDDINSYECWCPFGFEGKNCELDVTCNIKNGRCEQFCKNSADNKVVCSCTEGYRLAENQKSCEPAVPFPCGRVSVSQTSKLTRAETVFPDVDYVNSTEAETILDNITDGAILNNITQSTQSFNDFTRVVGGEDAKPGQFPWQVVLNGKVDAFCGGSIVNEKWIVTAAHCVETGVKITVVAGEHNIEETEHTEQKRNVIRIIPHHNYNAAINKYNHDIALLELDEPLVLNSYVTPICIADKEYTNIFLKFGSGYVSGWGRVFHKGRSALVLQYLRVPLVDRATCLRSTKFTIYNNMFCAGFHEGGRDSCQGDSGGPHVTEVEGTSFLTGIISWGEECAMKGKYGIYTKVSRYVNWIKEKTKLT

SEQ ID NO: 60 - protein, 424 aa, Artificial
  Human Factor IX variant with one or more additional N-linked glycan attachment consensus sequences inserted in the activation peptide
YNSGKLEEFVQGNLERECMEEKCSFEEAREVFENTERTTEFWKQYVDGDQCESNPCLNGGSCKDDINSYECWCPFGFEGKNCELDVTCNIKNGRCEQFCKNSADNKVVCSCTEGYRLAENQKSCEPAVPFPCGRVSVSQTSKLTRAETVFPDVDYVNSTEAETILDNITDGNITNNITQSTQSFNDFTRVVGGEDAKPGQFPWQVVLNGKVDAFCGGSIVNEKWIVTAAHCVETGVKITVVAGEHNIEETEHTEQKRNVIRIIPHHNYNAAINKYNHDIALLELDEPLVLNSYVTPICIADKEYTNIFLKFGSGYVSGWGRVFHKGRSALVLQYLRVPLVDRATCLRSTKFTIYNNMFCAGFHEGGRDSCQGDSGGPHVTEVEGTSFLTGIISWGEECAMKGKYGIYTKVSRYVNWIKEKTKLT

SEQ ID NO: 61 - protein, 424 aa, Artificial
  Human Factor IX variant with one or more additional N-linked glycan attachment consensus sequences inserted in the activation peptide
YNSGKLEEFVQGNLERECMEEKCSFEEAREVFENTERTTEFWKQYVDGDQCESNPCLNGGSCKDDINSYECWCPFGFEGKNCELDVTCNIKNGRCEQFCKNSADNKVVCSCTEGYRLAENQKSCEPAVPFPCGRVSVSQTSKLTRAETVFPDVDYVNSTEAETILDNISDGAILNNITQSTQSFNDFTRVVGGEDAKPGQFPWQVVLNGKVDAFCGGSIVNEKWIVTAAHCVETGVKITVVAGEHNIEETEHTEQKRNVIRIIPHHNYNAAINKYNHDIALLELDEPLVLNSYVTPICIADKEYTNIFLKFGSGYVSGWGRVFHKGRSALVLQYLRVPLVDRATCLRSTKFTIYNNMFCAGFHEGGRDSCQGDSGGPHVTEVEGTSFLTGIISWGEECAMKGKYGIYTKVSRYVNWIKEKTKLT

SEQ ID NO: 62 - protein, 424 aa, Artificial
  Human Factor IX variant with one or more additional N-linked glycan attachment consensus sequences inserted in the activation peptide
YNSGKLEEFVQGNLERECMEEKCSFEEAREVFENTERTTEFWKQYVDGDQCESNPCLNGGSCKDDINSYECWCPFGFEGKNCELDVTCNIKNGRCEQFCKNSADNKVVCSCTEGYRLAENQKSCEPAVPFPCGRVSVSQTSKLTRAETVFPDVDYVNSTEAETILDNISDGNISNNITQSTQSFNDFTRVVGGEDAKPGQFPWQVVLNGKVDAFCGGSIVNEKWIVTAAHCVETGVKITVVAGEHNIEETEHTEQKRNVIRIIPHHNYNAAINKYNHDIALLELDEPLVLNSYVTPICIADKEYTNIFLKFGSGYVSGWGRVFHKGRSALVLQYLRVPLVDRATCLRSTKFTIYNNMFCAGFHEGGRDSCQGDSGGPHVTEVEGTSFLTGIISWGEECAMKGKYGIYTKVSRYVNWIKEKTKLT

SEQ ID NO: 63 - protein, 424 aa, Artificial
  Human Factor IX variant with one or more additional N-linked glycan attachment consensus sequences inserted in the activation peptide
YNSGKLEEFVQGNLERECMEEKCSFEEAREVFENTERTTEFWKQYVDGDQCESNPCLNGGSCKDDINSYECWCPFGFEGKNCELDVTCNIKNGRCEQFCKNSADNKVVCSCTEGYRLAENQKSCEPAVPFPCGRVSVSQTSKLTRAETVFPDVDYVNSTEAETILDNITDGNISNNITQSTQSFNDFTRVVGGEDAKPGQFPWQVVLNGKVDAFCGGSIVNEKWIVTAAHCVETGVKITVVAGEHNIEETEHTEQKRNVIRIIPHHNYNAAINKYNHDIALLELDEPLVLNSYVTPICIADKEYTNIFLKFGSGYVSGWGRVFHKGRSALVLQYLRVPLVDRATCLRSTKFTIYNNMFCAGFHEGGRDSCQGDSGGPHVTEVEGTSFLTGIISWGEECAMKGKYGIYTKVSRYVNWIKEKTKLT

SEQ ID NO: 64 - protein, 424 aa, Artificial
  Human Factor IX variant with one or more additional N-linked glycan attachment consensus sequences inserted in the activation peptide
YNSGKLEEFVQGNLERECMEEKCSFEEAREVFENTERTTEFWKQYVDGDQCESNPCLNGGSCKDDINSYECWCPFGFEGKNCELDVTCNIKNGRCEQFCKNSADNKVVCSCTEGYRLAENQKSCEPAVPFPCGRVSVSQTSKLTRAETVFPDVDYVNSTEAETILDNISDGNITNNITQSTQSFNDFTRVVGGEDAKPGQFPWQVVLNGKVDAFCGGSIVNEKWIVTAAHCVETGVKITVVAGEHNIEETEHTEQKRNVIRIIPHHNYNAAINKYNHDIALLELDEPLVLNSYVTPICIADKEYTNIFLKFGSGYVSGWGRVFHKGRSALVLQYLRVPLVDRATCLRSTKFTIYNNMFCAGFHEGGRDSCQGDSGGPHVTEVEGTSFLTGIISWGEECAMKGKYGIYTKVSRYVNWIKEKTKLT

SEQ ID NO: 65 - protein, 437 aa, Artificial
  Human Factor IX variant with GAGA spacer between duplicate N-linked glycan attachment consensus sequences inserted in the activation peptide
YNSGKLEEFVQGNLERECMEEKCSFEEAREVFENTERTTEFWKQYVDGDQCESNPCLNGGSCKDDINSYECWCPFGFEGKNCELDVTCNIKNGRCEQFCKNSADNKVVCSCTEGYRLAENQKSCEPAVPFPCGRVSVSQTSKLTRAETVFPDVDYVNSTEAETILDNITDGAILNGAGANITDGAILNNITQSTQSFNDFTRVVGGEDAKPGQFPWQVVLNGKVDAFCGGSIVNEKWIVTAAHCVETGVKITVVAGEHNIEETEHTEQKRNVIRIIPHHNYNAAINKYNHDIALLELDEPLVLNSYVTPICIADKEYTNIFLKFGSGYVSGWGRVFHKGRSALVLQYLRVPLVDRATCLRSTKFTIYNNMFCAGFHEGGRDSCQGDSGGPHVTEVEGTSFLTGIISWGEECAMKGKYGIYTKVSRYVNWIKEKTKLT

SEQ ID NO: 66 - protein, 437 aa, Artificial
  Human Factor IX variant with GAGA spacer between duplicate N-linked glycan attachment consensus sequences inserted in the activation peptide
YNSGKLEEFVQGNLERECMEEKCSFEEAREVFENTERTTEFWKQYVDGDQCESNPCLNGGSCKDDINSYECWCPFGFEGKNCELDVTCNIKNGRCEQFCKNSADNKVVCSCTEGYRLAENQKSCEPAVPFPCGRVSVSQTSKLTRAETVFPDVDYVNSTEAETILDNITDGNITNGAGANITDGNITNNITQSTQSFNDFTRVVGGEDAKPGQFPWQVVLNGKVDAFCGGSIVNEKWIVTAAHCVETGVKITVVAGEHNIEETEHTEQKRNVIRIIPHHNYNAAINKYNHDIALLELDEPLVLNSYVTPICIADKEYTNIFLKFGSGYVSGWGRVFHKGRSALVLQYLRVPLVDRATCLRSTKFTIYNNMFCAGFHEGGRDSCQGDSGGPHVTEVEGTSFLTGIISWGEECAMKGKYGIYTKVSRYVNWIKEKTKLT

SEQ ID NO: 67 - protein, 437 aa, Artificial
  Human Factor IX variant with GAGA spacer between duplicate N-linked glycan attachment consensus sequences inserted in the activation peptide
YNSGKLEEFVQGNLERECMEEKCSFEEAREVFENTERTTEFWKQYVDGDQCESNPCLNGGSCKDDINSYECWCPFGFEGKNCELDVTCNIKNGRCEQFCKNSADNKVVCSCTEGYRLAENQKSCEPAVPFPCGRVSVSQTSKLTRAETVFPDVDYVNSTEAETILDNISDGAILNGAGANISDGAILNNITQSTQSFNDFTRVVGGEDAKPGQFPWQVVLNGKVDAFCGGSIVNEKWIVTAAHCVETGVKITVVAGEHNIEETEHTEQKRNVIRIIPHHNYNAAINKYNHDIALLELDEPLVLNSYVTPICIADKEYTNIFLKFGSGYVSGWGRVFHKGRSALVLQYLRVPLVDRATCLRSTKFTIYNNMFCAGFHEGGRDSCQGDSGGPHVTEVEGTSFLTGIISWGEECAMKGKYGIYTKVSRYVNWIKEKTKLT

SEQ ID NO: 68 - protein, 437 aa, Artificial
  Human Factor IX variant with GAGA spacer between duplicate N-linked glycan attachment consensus sequences inserted in the activation peptide
YNSGKLEEFVQGNLERECMEEKCSFEEAREVFENTERTTEFWKQYVDGDQCESNPCLNGGSCKDDINSYECWCPFGFEGKNCELDVTCNIKNGRCEQFCKNSADNKVVCSCTEGYRLAENQKSCEPAVPFPCGRVSVSQTSKLTRAETVFPDVDYVNSTEAETILDNISDGNISNGAGANISDGNISNNITQSTQSFNDFTRVVGGEDAKPGQFPWQVVLNGKVDAFCGGSIVNEKWIVTAAHCVETGVKITVVAGEHNIEETEHTEQKRNVIRIIPHHNYNAAINKYNHDIALLELDEPLVLNSYVTPICIADKEYTNIFLKFGSGYVSGWGRVFHKGRSALVLQYLRVPLVDRATCLRSTKFTIYNNMFCAGFHEGGRDSCQGDSGGPHVTEVEGTSFLTGIISWGEECAMKGKYGIYTKVSRYVNWIKEKTKLT

SEQ ID NO: 69 - protein, 437 aa, Artificial
  Human Factor IX variant with GAGA spacer between duplicate N-linked glycan attachment consensus sequences inserted in the activation peptide
YNSGKLEEFVQGNLERECMEEKCSFEEAREVFENTERTTEFWKQYVDGDQCESNPCLNGGSCKDDINSYECWCPFGFEGKNCELDVTCNIKNGRCEQFCKNSADNKVVCSCTEGYRLAENQKSCEPAVPFPCGRVSVSQTSKLTRAETVFPDVDYVNSTEAETILDNITDGNISNGAGANITDGNISNNITQSTQSFNDFTRVVGGEDAKPGQFPWQVVLNGKVDAFCGGSIVNEKWIVTAAHCVETGVKITVVAGEHNIEETEHTEQKRNVIRIIPHHNYNAAINKYNHDIALLELDEPLVLNSYVTPICIADKEYTNIFLKFGSGYVSGWGRVFHKGRSALVLQYLRVPLVDRATCLRSTKFTIYNNMFCAGFHEGGRDSCQGDSGGPHVTEVEGTSFLTGIISWGEECAMKGKYGIYTKVSRYVNWIKEKTKLT

SEQ ID NO: 70 - protein, 437 aa, Artificial
  Human Factor IX variant with GAGA spacer between duplicate N-linked glycan attachment consensus sequences inserted in the activation peptide
YNSGKLEEFVQGNLERECMEEKCSFEEAREVFENTERTTEFWKQYVDGDQCESNPCLNGGSCKDDINSYECWCPFGFEGKNCELDVTCNIKNGRCEQFCKNSADNKVVCSCTEGYRLAENQKSCEPAVPFPCGRVSVSQTSKLTRAETVFPDVDYVNSTEAETILDNISDGNITNGAGANISDGNITNNITQSTQSFNDFTRVVGGEDAKPGQFPWQVVLNGKVDAFCGGSIVNEKWIVTAAHCVETGVKITVVAGEHNIEETEHTEQKRNVIRIIPHHNYNAAINKYNHDIALLELDEPLVLNSYVTPICIADKEYTNIFLKFGSGYVSGWGRVFHKGRSALVLQYLRVPLVDRATCLRSTKFTIYNNMFCAGFHEGGRDSCQGDSGGPHVTEVEGTSFLTGIISWGEECAMKGKYGIYTKVSRYVNWIKEKTKLT

SEQ ID NO: 71 - protein, 450 aa, Artificial
  Human Factor IX variant with GAGA spacer between triplicate N-linked glycan attachment consensus sequences inserted in the activation peptide
YNSGKLEEFVQGNLERECMEEKCSFEEAREVFENTERTTEFWKQYVDGDQCESNPCLNGGSCKDDINSYECWCPFGFEGKNCELDVTCNIKNGRCEQFCKNSADNKVVCSCTEGYRLAENQKSCEPAVPFPCGRVSVSQTSKLTRAETVFPDVDYVNSTEAETILDNITDGAILNGAGANITDGAILNGAGANITDGAILNNITQSTQSFNDFTRVVGGEDAKPGQFPWQVVLNGKVDAFCGGSIVNEKWIVTAAHCVETGVKITVVAGEHNIEETEHTEQKRNVIRIIPHHNYNAAINKYNHDIALLELDEPLVLNSYVTPICIADKEYTNIFLKFGSGYVSGWGRVFHKGRSALVLQYLRVPLVDRATCLRSTKFTIYNNMFCAGFHEGGRDSCQGDSGGPHVTEVEGTSFLTGIISWGEECAMKGKYGIYTKVSRYVNWIKEKTKLT

SEQ ID NO: 72 - protein, 450 aa, Artificial
  Human Factor IX variant with GAGA spacer between triplicate N-linked glycan attachment consensus sequences inserted in the activation peptide
YNSGKLEEFVQGNLERECMEEKCSFEEAREVFENTERTTEFWKQYVDGDQCESNPCLNGGSCKDDINSYECWCPFGFEGKNCELDVTCNIKNGRCEQFCKNSADNKVVCSCTEGYRLAENQKSCEPAVPFPCGRVSVSQTSKLTRAETVFPDVDYVNSTEAETILDNITDGNITNGAGANITDGNITNGAGANITDGNITNNITQSTQSFNDFTRVVGGEDAKPGQFPWQVVLNGKVDAFCGGSIVNEKWIVTAAHCVETGVKITVVAGEHNIEETEHTEQKRNVIRIIPHHNYNAAINKYNHDIALLELDEPLVLNSYVTPICIADKEYTNIFLKFGSGYVSGWGRVFHKGRSALVLQYLRVPLVDRATCLRSTKFTIYNNMFCAGFHEGGRDSCQGDSGGPHVTEVEGTSFLTGIISWGEECAMKGKYGIYTKVSRYVNWIKEKTKLT

SEQ ID NO: 73 - protein, 450 aa, Artificial
  Human Factor IX variant with GAGA spacer between triplicate N-linked glycan attachment consensus sequences inserted in the activation peptide
YNSGKLEEFVQGNLERECMEEKCSFEEAREVFENTERTTEFWKQYVDGDQCESNPCLNGGSCKDDINSYECWCPFGFEGKNCELDVTCNIKNGRCEQFCKNSADNKVVCSCTEGYRLAENQKSCEPAVPFPCGRVSVSQTSKLTRAETVFPDVDYVNSTEAETILDNISDGAILNGAGANISDGAILNGAGANISDGAILNNITQSTQSFNDFTRVVGGEDAKPGQFPWQVVLNGKVDAFCGGSIVNEKWIVTAAHCVETGVKITVVAGEHNIEETEHTEQKRNVIRIIPHHNYNAAINKYNHDIALLELDEPLVLNSYVTPICIADKEYTNIFLKFGSGYVSGWGRVFHKGRSALVLQYLRVPLVDRATCLRSTKFTIYNNMFCAGFHEGGRDSCQGDSGGPHVTEVEGTSFLTGIISWGEECAMKGKYGIYTKVSRYVNWIKEKTKLT

SEQ ID NO: 74 - protein, 450 aa, Artificial
  Human Factor IX variant with GAGA spacer between triplicate N-linked glycan attachment consensus sequences inserted in the activation peptide
YNSGKLEEFVQGNLERECMEEKCSFEEAREVFENTERTTEFWKQYVDGDQCESNPCLNGGSCKDDINSYECWCPFGFEGKNCELDVTCNIKNGRCEQFCKNSADNKVVCSCTEGYRLAENQKSCEPAVPFPCGRVSVSQTSKLTRAETVFPDVDYVNSTEAETILDNISDGNISNGAGANISDGNISNGAGANISDGNISNNITQSTQSFNDFTRVVGGEDAKPGQFPWQVVLNGKVDAFCGGSIVNEKWIVTAAHCVETGVKITVVAGEHNIEETEHTEQKRNVIRIIPHHNYNAAINKYNHDIALLELDEPLVLNSYVTPICIADKEYTNIFLKFGSGYVSGWGRVFHKGRSALVLQYLRVPLVDRATCLRSTKFTIYNNMFCAGFHEGGRDSCQGDSGGPHVTEVEGTSFLTGIISWGEECAMKGKYGIYTKVSRYVNWIKEKTKLT

SEQ ID NO: 75 - protein, 450 aa, Artificial
  Human Factor IX variant with GAGA spacer between triplicate N-linked glycan attachment consensus sequences inserted in the activation peptide
YNSGKLEEFVQGNLERECMEEKCSFEEAREVFENTERTTEFWKQYVDGDQCESNPCLNGGSCKDDINSYECWCPFGFEGKNCELDVTCNIKNGRCEQFCKNSADNKVVCSCTEGYRLAENQKSCEPAVPFPCGRVSVSQTSKLTRAETVFPDVDYVNSTEAETILDNITDGNISNGAGANITDGNISNGAGANITDGNISNNITQSTQSFNDFTRVVGGEDAKPGQFPWQVVLNGKVDAFCGGSIVNEKWIVTAAHCVETGVKITVVAGEHNIEETEHTEQKRNVIRIIPHHNYNAAINKYNHDIALLELDEPLVLNSYVTPICIADKEYTNIFLKFGSGYVSGWGRVFHKGRSALVLQYLRVPLVDRATCLRSTKFTIYNNMFCAGFHEGGRDSCQGDSGGPHVTEVEGTSFLTGIISWGEECAMKGKYGIYTKVSRYVNWIKEKTKLT

SEQ ID NO: 76 - protein, 450 aa, Artificial
  Human Factor IX variant with GAGA spacer between triplicate N-linked glycan attachment consensus sequences inserted in the activation peptide
YNSGKLEEFVQGNLERECMEEKCSFEEAREVFENTERTTEFWKQYVDGDQCESNPCLNGGSCKDDINSYECWCPFGFEGKNCELDVTCNIKNGRCEQFCKNSADNKVVCSCTEGYRLAENQKSCEPAVPFPCGRVSVSQTSKLTRAETVFPDVDYVNSTEAETILDNISDGNITNGAGANISDGNITNGAGANISDGNITNNITQSTQSFNDFTRVVGGEDAKPGQFPWQVVLNGKVDAFCGGSIVNEKWIVTAAHCVETGVKITVVAGEHNIEETEHTEQKRNVIRIIPHHNYNAAINKYNHDIALLELDEPLVLNSYVTPICIADKEYTNIFLKFGSGYVSGWGRVFHKGRSALVLQYLRVPLVDRATCLRSTKFTIYNNMFCAGFHEGGRDSCQGDSGGPHVTEVEGTSFLTGIISWGEECAMKGKYGIYTKVSRYVNWIKEKTKLT

SEQ ID NO: 77 - protein, 450 aa, Artificial
  Human Factor IX variant with GAGA spacer between N-linked glycan attachment consensus sequences inserted in the activation peptide
YNSGKLEEFVQGNLERECMEEKCSFEEAREVFENTERTTEFWKQYVDGDQCESNPCLNGGSCKDDINSYECWCPFGFEGKNCELDVTCNIKNGRCEQFCKNSADNKVVCSCTEGYRLAENQKSCEPAVPFPCGRVSVSQTSKLTRAETVFPDVDYVNSTEAETILDNITDGAILNGAGANISDGNITNGAGANISDGNITNNITQSTQSFNDFTRVVGGEDAKPGQFPWQVVLNGKVDAFCGGSIVNEKWIVTAAHCVETGVKITVVAGEHNIEETEHTEQKRNVIRIIPHHNYNAAINKYNHDIALLELDEPLVLNSYVTPICIADKEYTNIFLKFGSGYVSGWGRVFHKGRSALVLQYLRVPLVDRATCLRSTKFTIYNNMFCAGFHEGGRDSCQGDSGGPHVTEVEGTSFLTGIISWGEECAMKGKYGIYTKVSRYVNWIKEKTKLT

SEQ ID NO: 78 - protein, 450 aa, Artificial
  Human Factor IX variant with GAGA spacer between N-linked glycan attachment consensus sequences inserted in the activation peptide
YNSGKLEEFVQGNLERECMEEKCSFEEAREVFENTERTTEFWKQYVDGDQCESNPCLNGGSCKDDINSYECWCPFGFEGKNCELDVTCNIKNGRCEQFCKNSADNKVVCSCTEGYRLAENQKSCEPAVPFPCGRVSVSQTSKLTRAETVFPDVDYVNSTEAETILDNISDGAILNGAGANITDGNISNGAGANITDGNISNNITQSTQSFNDFTRVVGGEDAKPGQFPWQVVLNGKVDAFCGGSIVNEKWIVTAAHCVETGVKITVVAGEHNIEETEHTEQKRNVIRIIPHHNYNAAINKYNHDIALLELDEPLVLNSYVTPICIADKEYTNIFLKFGSGYVSGWGRVFHKGRSALVLQYLRVPLVDRATCLRSTKFTIYNNMFCAGFHEGGRDSCQGDSGGPHVTEVEGTSFLTGIISWGEECAMKGKYGIYTKVSRYVNWIKEKTKLT

SEQ ID NO: 79 - protein, 424 aa, Artificial
  Human Factor IX variant with one or more N-linked glycan attachment consensus sequences inserted in the activation peptide
YNSGKLEEFVQGNLERECMEEKCSFEEAREVFENTERTTEFWKQYVDGDQCESNPCLNGGSCKDDINSYECWCPFGFEGKNCELDVTCNIKNGRCEQFCKNSADNKVVCSCTEGYRLAENQKSCEPAVPFPCGRVSVSQTSKLTRAETVFPDVNITDGAILNDYVNSTEAETILDNITQSTQSFNDFTRVVGGEDAKPGQFPWQVVLNGKVDAFCGGSIVNEKWIVTAAHCVETGVKITVVAGEHNIEETEHTEQKRNVIRIIPHHNYNAAINKYNHDIALLELDEPLVLNSYVTPICIADKEYTNIFLKFGSGYVSGWGRVFHKGRSALVLQYLRVPLVDRATCLRSTKFTIYNNMFCAGFHEGGRDSCQGDSGGPHVTEVEGTSFLTGIISWGEECAMKGKYGIYTKVSRYVNWIKEKTKLT

SEQ ID NO: 80 - protein, 424 aa, Artificial
  Human Factor IX variant with one or more N-linked glycan attachment consensus sequences inserted in the activation peptide
YNSGKLEEFVQGNLERECMEEKCSFEEAREVFENTERTTEFWKQYVDGDQCESNPCLNGGSCKDDINSYECWCPFGFEGKNCELDVTCNIKNGRCEQFCKNSADNKVVCSCTEGYRLAENQKSCEPAVPFPCGRVSVSQTSKLTRAETVFPDVNITDGNITNDYVNSTEAETILDNITQSTQSFNDFTRVVGGEDAKPGQFPWQVVLNGKVDAFCGGSIVNEKWIVTAAHCVETGVKITVVAGEHNIEETEHTEQKRNVIRIIPHHNYNAAINKYNHDIALLELDEPLVLNSYVTPICIADKEYTNIFLKFGSGYVSGWGRVFHKGRSALVLQYLRVPLVDRATCLRSTKFTIYNNMFCAGFHEGGRDSCQGDSGGPHVTEVEGTSFLTGIISWGEECAMKGKYGIYTKVSRYVNWIKEKTKLT

SEQ ID NO: 81 - protein, 424 aa, Artificial
  Human Factor IX variant with one or more N-linked glycan attachment consensus sequences inserted in the activation peptide
YNSGKLEEFVQGNLERECMEEKCSFEEAREVFENTERTTEFWKQYVDGDQCESNPCLNGGSCKDDINSYECWCPFGFEGKNCELDVTCNIKNGRCEQFCKNSADNKVVCSCTEGYRLAENQKSCEPAVPFPCGRVSVSQTSKLTRAETVFPDVDYVNSTEAETILDNITQSTQSFNDFTNITDGAILNRVVGGEDAKPGQFPWQVVLNGKVDAFCGGSIVNEKWIVTAAHCVETGVKITVVAGEHNIEETEHTEQKRNVIRIIPHHNYNAAINKYNHDIALLELDEPLVLNSYVTPICIADKEYTNIFLKFGSGYVSGWGRVFHKGRSALVLQYLRVPLVDRATCLRSTKFTIYNNMFCAGFHEGGRDSCQGDSGGPHVTEVEGTSFLTGIISWGEECAMKGKYGIYTKVSRYVNWIKEKTKLT

SEQ ID NO: 82 - protein, 424 aa, Artificial
  Human Factor IX variant with one or more N-linked glycan attachment consensus sequences inserted in the activation peptide
YNSGKLEEFVQGNLERECMEEKCSFEEAREVFENTERTTEFWKQYVDGDQCESNPCLNGGSCKDDINSYECWCPFGFEGKNCELDVTCNIKNGRCEQFCKNSADNKVVCSCTEGYRLAENQKSCEPAVPFPCGRVSVSQTSKLTRAETVFPDVDYVNSTEAETILDNITQSTQSFNDFTNITDGNITNRVVGGEDAKPGQFPWQVVLNGKVDAFCGGSIVNEKWIVTAAHCVETGVKITVVAGEHNIEETEHTEQKRNVIRIIPHHNYNAAINKYNHDIALLELDEPLVLNSYVTPICIADKEYTNIFLKFGSGYVSGWGRVFHKGRSALVLQYLRVPLVDRATCLRSTKFTIYNNMFCAGFHEGGRDSCQGDSGGPHVTEVEGTSFLTGIISWGEECAMKGKYGIYTKVSRYVNWIKEKTKLT

SEQ ID NO: 83 - protein, 450 aa, Artificial
  Human Factor IX variant with one or more N-linked glycan attachment consensus sequences inserted in the activation peptide
YNSGKLEEFVQGNLERECMEEKCSFEEAREVFENTERTTEFWKQYVDGDQCESNPCLNGGSCKDDINSYECWCPFGFEGKNCELDVTCNIKNGRCEQFCKNSADNKVVCSCTEGYRLAENQKSCEPAVPFPCGRVSVSQTSKLTRAETVFPDVNISDGAILNGAGANISDGAILNGAGANISDGAILNDYVNSTEAETILDNITQSTQSFNDFTRVVGGEDAKPGQFPWQVVLNGKVDAFCGGSIVNEKWIVTAAHCVETGVKITVVAGEHNIEETEHTEQKRNVIRIIPHHNYNAAINKYNHDIALLELDEPLVLNSYVTPICIADKEYTNIFLKFGSGYVSGWGRVFHKGRSALVLQYLRVPLVDRATCLRSTKFTIYNNMFCAGFHEGGRDSCQGDSGGPHVTEVEGTSFLTGIISWGEECAMKGKYGIYTKVSRYVNWIKEKTKLT

SEQ ID NO: 84 - protein, 450 aa, Artificial
  Human Factor IX variant with one or more N-linked glycan attachment consensus sequences inserted in the activation peptide
YNSGKLEEFVQGNLERECMEEKCSFEEAREVFENTERTTEFWKQYVDGDQCESNPCLNGGSCKDDINSYECWCPFGFEGKNCELDVTCNIKNGRCEQFCKNSADNKVVCSCTEGYRLAENQKSCEPAVPFPCGRVSVSQTSKLTRAETVFPDVDYVNSTEAETILDNITQSTQSFNDFTNISDGAILNGAGANISDGAILNGAGANISDGAILNRVVGGEDAKPGQFPWQVVLNGKVDAFCGGSIVNEKWIVTAAHCVETGVKITVVAGEHNIEETEHTEQKRNVIRIIPHHNYNAAINKYNHDIALLELDEPLVLNSYVTPICIADKEYTNIFLKFGSGYVSGWGRVFHKGRSALVLQYLRVPLVDRATCLRSTKFTIYNNMFCAGFHEGGRDSCQGDSGGPHVTEVEGTSFLTGIISWGEECAMKGKYGIYTKVSRYVNWIKEKTKLT

SEQ ID NO: 85 - protein, 437 aa, Artificial
  Human Factor IX variant with one or more N-linked glycan attachment consensus sequences inserted in the activation peptide
YNSGKLEEFVQGNLERECMEEKCSFEEAREVFENTERTTEFWKQYVDGDQCESNPCLNGGSCKDDINSYECWCPFGFEGKNCELDVTCNIKNGRCEQFCKNSADNKVVCSCTEGYRLAENQKSCEPAVPFPCGRVSVSQTSKLTRAETVFPDVNITDGNISNGAGANITDGNISNDYVNSTEAETILDNITQSTQSFNDFTRVVGGEDAKPGQFPWQVVLNGKVDAFCGGSIVNEKWIVTAAHCVETGVKITVVAGEHNIEETEHTEQKRNVIRIIPHHNYNAAINKYNHDIALLELDEPLVLNSYVTPICIADKEYTNIFLKFGSGYVSGWGRVFHKGRSALVLQYLRVPLVDRATCLRSTKFTIYNNMFCAGFHEGGRDSCQGDSGGPHVTEVEGTSFLTGIISWGEECAMKGKYGIYTKVSRYVNWIKEKTKLT

SEQ ID NO: 86 - protein, 450 aa, Artificial
  Human Factor IX variant with one or more N-linked glycan attachment consensus sequences inserted in the activation peptide
YNSGKLEEFVQGNLERECMEEKCSFEEAREVFENTERTTEFWKQYVDGDQCESNPCLNGGSCKDDINSYECWCPFGFEGKNCELDVTCNIKNGRCEQFCKNSADNKVVCSCTEGYRLAENQKSCEPAVPFPCGRVSVSQTSKLTRAETVFPDVDYVNSTEAETILDNITDGNISNGAGANITDGNISNGAGANISDGAILNNITQSTQSFNDFTRVVGGEDAKPGQFPWQVVLNGKVDAFCGGSIVNEKWIVTAAHCVETGVKITVVAGEHNIEETEHTEQKRNVIRIIPHHNYNAAINKYNHDIALLELDEPLVLNSYVTPICIADKEYTNIFLKFGSGYVSGWGRVFHKGRSALVLQYLRVPLVDRATCLRSTKFTIYNNMFCAGFHEGGRDSCQGDSGGPHVTEVEGTSFLTGIISWGEECAMKGKYGIYTKVSRYVNWIKEKTKLT

SEQ ID NO: 87 - protein, 437 aa, Artificial; identical to SEQ ID NO: 65
  Human Factor IX variant with one or more N-linked glycan attachment consensus sequences inserted in the activation peptide

SEQ ID NO: 88 - protein, 460 aa, Artificial
  Human Factor IX variant with one or more N-linked glycan attachment consensus sequences inserted in the activation peptide
YNSGKLEEFVQGNLERECMEEKCSFEEAREVFENTERTTEFWKQYVDGDQCESNPCLNGGSCKDDINSYECWCPFGFEGKNCELDVTCNIKNGRCEQFCKNSADNKVVCSCTEGYRLAENQKSCEPAVPFPCGRVSVSQTSKLTRAETVFPDVDYVNSTEAETILDAETVFPDVDYVNSTENETIQDNITDNETILDNITQSTQSFNDFTRNITQSTQSFNDFTRVVGGEDAKPGQFPWQVVLNGKVDAFCGGSIVNEKWIVTAAHCVETGVKITVVAGEHNIEETEHTEQKRNVIRIIPHHNYNAAINKYNHDIALLELDEPLVLNSYVTPICIADKEYTNIFLKFGSGYVSGWGRVFHKGRSALVLQYLRVPLVDRATCLRSTKFTIYNNMFCAGFHEGGRDSCQGDSGGPHVTEVEGTSFLTGIISWGEECAMKGKYGIYTKVSRYVNWIKEKTKLT

SEQ ID NO: 89 - protein, 460 aa, Artificial
  Human Factor IX variant with one or more N-linked glycan attachment consensus sequences inserted in the activation peptide
YNSGKLEEFVQGNLERECMEEKCSFEEAREVFENTERTTEFWKQYVDGDQCESNPCLNGGSCKDDINSYECWCPFGFEGKNCELDVTCNIKNGRCEQFCKNSADNKVVCSCTEGYRLAENQKSCEPAVPFPCGRVSVSQTSKLTRAETVFPDVAETVFPDVDYVNSTENETIQDNITDNETILDNITQSTQSFNDFTRDYVNSTEAETILDNITQSTQSFNDFTRVVGGEDAKPGQFPWQVVLNGKVDAFCGGSIVNEKWIVTAAHCVETGVKITVVAGEHNIEETEHTEQKRNVIRIIPHHNYNAAINKYNHDIALLELDEPLVLNSYVTPICIADKEYTNIFLKFGSGYVSGWGRVFHKGRSALVLQYLRVPLVDRATCLRSTKFTIYNNMFCAGFHEGGRDSCQGDSGGPHVTEVEGTSFLTGIISWGEECAMKGKYGIYTKVSRYVNWIKEKTKLT

SEQ ID NO: 90 - protein, 460 aa, Artificial
  Human Factor IX variant with one or more N-linked glycan attachment consensus sequences inserted in the activation peptide
YNSGKLEEFVQGNLERECMEEKCSFEEAREVFENTERTTEFWKQYVDGDQCESNPCLNGGSCKDDINSYECWCPFGFEGKNCELDVTCNIKNGRCEQFCKNSADNKVVCSCTEGYRLAENQKSCEPAVPFPCGRVSVSQTSKLTRAETVFPDVDYVNSTEAETILDNITQSTQSFNDFTAETVFPDVDYVNSTENETIQDNITDNETILDNITQSTQSFNDFTRRVVGGEDAKPGQFPWQVVLNGKVDAFCGGSIVNEKWIVTAAHCVETGVKITVVAGEHNIEETEHTEQKRNVIRIIPHHNYNAAINKYNHDIALLELDEPLVLNSYVTPICIADKEYTNIFLKFGSGYVSGWGRVFHKGRSALVLQYLRVPLVDRATCLRSTKFTIYNNMFCAGFHEGGRDSCQGDSGGPHVTEVEGTSFLTGIISWGEECAMKGKYGIYTKVSRYVNWIKEKTKLT

SEQ ID NO: 91 - protein, 460 aa, Artificial
  Human Factor IX variant with one or more N-linked glycan attachment consensus sequences inserted in the activation peptide
YNSGKLEEFVQGNLERECMEEKCSFEEAREVFENTERTTEFWKQYVDGDQCESNPCLNGGSCKDDINSYECWCPFGFEGKNCELDVTCNIKNGRCEQFCKNSADNKVVCSCTEGYRLAENQKSCEPAVPFPCGRVSVSQTSKLTRAETVFPDVDYVNSTEAAETVFPDVDYVNSTENETIQDNITDNETILDNITQSTQSFNDFTRETILDNITQSTQSFNDFTRVVGGEDAKPGQFPWQVVLNGKVDAFCGGSIVNEKWIVTAAHCVETGVKITVVAGEHNIEETEHTEQKRNVIRIIPHHNYNAAINKYNHDIALLELDEPLVLNSYVTPICIADKEYTNIFLKFGSGYVSGWGRVFHKGRSALVLQYLRVPLVDRATCLRSTKFTIYNNMFCAGFHEGGRDSCQGDSGGPHVTEVEGTSFLTGIISWGEECAMKGKYGIYTKVSRYVNWIKEKTKLT

SEQ ID NO: 92 - protein, 422 aa, Artificial
  Human Factor IX variant with O-linked glycan attachment consensus sequence inserted in the activation peptide
  misc_feature (168)..(169): Xaa can be any naturally occurring amino acid
  misc_feature (172)..(172): Xaa can be Ser or Thr
YNSGKLEEFVQGNLERECMEEKCSFEEAREVFENTERTTEFWKQYVDGDQCESNPCLNGGSCKDDINSYECWCPFGFEGKNCELDVTCNIKNGRCEQFCKNSADNKVVCSCTEGYRLAENQKSCEPAVPFPCGRVSVSQTSKLTRAETVFPDVDYVNSTEAETILDCXXGGXCNITQSTQSFNDFTRVVGGEDAKPGQFPWQVVLNGKVDAFCGGSIVNEKWIVTAAHCVETGVKITVVAGEHNIEETEHTEQKRNVIRIIPHHNYNAAINKYNHDIALLELDEPLVLNSYVTPICIADKEYTNIFLKFGSGYVSGWGRVFHKGRSALVLQYLRVPLVDRATCLRSTKFTIYNNMFCAGFHEGGRDSCQGDSGGPHVTEVEGTSFLTGIISWGEECAMKGKYGIYTKVSRYVNWIKEKTKLT

SEQ ID NO: 93 - protein, 422 aa, Artificial
  Human Factor IX variant with O-linked glycan attachment consensus sequence inserted in the activation peptide
  misc_feature (149)..(150): Xaa can be any naturally occurring amino acid
  misc_feature (153)..(153): Xaa can be Ser or Thr
YNSGKLEEFVQGNLERECMEEKCSFEEAREVFENTERTTEFWKQYVDGDQCESNPCLNGGSCKDDINSYECWCPFGFEGKNCELDVTCNIKNGRCEQFCKNSADNKVVCSCTEGYRLAENQKSCEPAVPFPCGRVSVSQTSKLTRAECXXGGXCTVFPDVDYVNSTEAETILDNITQSTQSFNDFTRVVGGEDAKPGQFPWQVVLNGKVDAFCGGSIVNEKWIVTAAHCVETGVKITVVAGEHNIEETEHTEQKRNVIRIIPHHNYNAAINKYNHDIALLELDEPLVLNSYVTPICIADKEYTNIFLKFGSGYVSGWGRVFHKGRSALVLQYLRVPLVDRATCLRSTKFTIYNNMFCAGFHEGGRDSCQGDSGGPHVTEVEGTSFLTGIISWGEECAMKGKYGIYTKVSRYVNWIKEKTKLT

SEQ ID NO: 94 - protein, 422 aa, Artificial
  Human Factor IX variant with O-linked glycan attachment consensus sequence inserted in the activation peptide
  misc_feature (179)..(180): Xaa can be any naturally occurring amino acid
  misc_feature (183)..(183): Xaa can be Ser or Thr
YNSGKLEEFVQGNLERECMEEKCSFEEAREVFENTERTTEFWKQYVDGDQCESNPCLNGGSCKDDINSYECWCPFGFEGKNCELDVTCNIKNGRCEQFCKNSADNKVVCSCTEGYRLAENQKSCEPAVPFPCGRVSVSQTSKLTRAETVFPDVDYVNSTEAETILDNITQSTQSFNDCXXGGXCFTRVVGGEDAKPGQFPWQVVLNGKVDAFCGGSIVNEKWIVTAAHCVETGVKITVVAGEHNIEETEHTEQKRNVIRIIPHHNYNAAINKYNHDIALLELDEPLVLNSYVTPICIADKEYTNIFLKFGSGYVSGWGRVFHKGRSALVLQYLRVPLVDRATCLRSTKFTIYNNMFCAGFHEGGRDSCQGDSGGPHVTEVEGTSFLTGIISWGEECAMKGKYGIYTKVSRYVNWIKEKTKLT

SEQ ID NO: 95 - protein, 422 aa, Artificial
  Human Factor IX variant with O-linked glycan attachment consensus sequence inserted in the activation peptide
  misc_feature (150)..(151): Xaa can be any naturally occurring amino acid
  misc_feature (154)..(154): Xaa can be Ser or Thr
YNSGKLEEFVQGNLERECMEEKCSFEEAREVFENTERTTEFWKQYVDGDQCESNPCLNGGSCKDDINSYECWCPFGFEGKNCELDVTCNIKNGRCEQFCKNSADNKVVCSCTEGYRLAENQKSCEPAVPFPCGRVSVSQTSKLTRAETCXXGGXCVFPDVDYVNSTEAETILDNITQSTQSFNDFTRVVGGEDAKPGQFPWQVVLNGKVDAFCGGSIVNEKWIVTAAHCVETGVKITVVAGEHNIEETEHTEQKRNVIRIIPHHNYNAAINKYNHDIALLELDEPLVLNSYVTPICIADKEYTNIFLKFGSGYVSGWGRVFHKGRSALVLQYLRVPLVDRATCLRSTKFTIYNNMFCAGFHEGGRDSCQGDSGGPHVTEVEGTSFLTGIISWGEECAMKGKYGIYTKVSRYVNWIKEKTKLT

SEQ ID NO: 96 - protein, 422 aa, Artificial
  Human Factor IX variant with O-linked glycan attachment consensus sequence inserted in the activation peptide
  misc_feature (175)..(176): Xaa can be any naturally occurring amino acid
  misc_feature (179)..(179): Xaa can be Ser or Thr
YNSGKLEEFVQGNLERECMEEKCSFEEAREVFENTERTTEFWKQYVDGDQCESNPCLNGGSCKDDINSYECWCPFGFEGKNCELDVTCNIKNGRCEQFCKNSADNKVVCSCTEGYRLAENQKSCEPAVPFPCGRVSVSQTSKLTRAETVFPDVDYVNSTEAETILDNITQSTQCXXGGXCSFNDFTRVVGGEDAKPGQFPWQVVLNGKVDAFCGGSIVNEKWIVTAAHCVETGVKITVVAGEHNIEETEHTEQKRNVIRIIPHHNYNAAINKYNHDIALLELDEPLVLNSYVTPICIADKEYTNIFLKFGSGYVSGWGRVFHKGRSALVLQYLRVPLVDRATCLRSTKFTIYNNMFCAGFHEGGRDSCQGDSGGPHVTEVEGTSFLTGIISWGEECAMKGKYGIYTKVSRYVNWIKEKTKLT

SEQ ID NO: 97 - protein, 422 aa, Artificial
  Human Factor IX variant with O-linked glycan attachment consensus sequence inserted in the activation peptide
  misc_feature (165)..(166): Xaa can be any naturally occurring amino acid
  misc_feature (169)..(169): Xaa can be Ser or Thr
YNSGKLEEFVQGNLERECMEEKCSFEEAREVFENTERTTEFWKQYVDGDQCESNPCLNGGSCKDDINSYECWCPFGFEGKNCELDVTCNIKNGRCEQFCKNSADNKVVCSCTEGYRLAENQKSCEPAVPFPCGRVSVSQTSKLTRAETVFPDVDYVNSTEAETCXXGGXCILDNITQSTQSFNDFTRVVGGEDAKPGQFPWQVVLNGKVDAFCGGSIVNEKWIVTAAHCVETGVKITVVAGEHNIEETEHTEQKRNVIRIIPHHNYNAAINKYNHDIALLELDEPLVLNSYVTPICIADKEYTNIFLKFGSGYVSGWGRVFHKGRSALVLQYLRVPLVDRATCLRSTKFTIYNNMFCAGFHEGGRDSCQGDSGGPHVTEVEGTSFLTGIISWGEECAMKGKYGIYTKVSRYVNWIKEKTKLT

SEQ ID NO: 98 - protein, 420 aa, Artificial
  Human Factor IX variant with O-linked glycan attachment consensus sequence inserted in the activation peptide
  misc_feature (170)..(170): Xaa can be Asp or Glu
YNSGKLEEFVQGNLERECMEEKCSFEEAREVFENTERTTEFWKQYVDGDQCESNPCLNGGSCKDDINSYECWCPFGFEGKNCELDVTCNIKNGRCEQFCKNSADNKVVCSCTEGYRLAENQKSCEPAVPFPCGRVSVSQTSKLTRAETVFPDVDYVNSTEAETILDNSTXANITQSTQSFNDFTRVVGGEDAKPGQFPWQVVLNGKVDAFCGGSIVNEKWIVTAAHCVETGVKITVVAGEHNIEETEHTEQKRNVIRIIPHHNYNAAINKYNHDIALLELDEPLVLNSYVTPICIADKEYTNIFLKFGSGYVSGWGRVFHKGRSALVLQYLRVPLVDRATCLRSTKFTIYNNMFCAGFHEGGRDSCQGDSGGPHVTEVEGTSFLTGIISWGEECAMKGKYGIYTKVSRYVNWIKEKTKLT

SEQ ID NO: 99 - protein, 420 aa, Artificial
  Human Factor IX variant with O-linked glycan attachment consensus sequence inserted in the activation peptide
  misc_feature (183)..(183): Xaa can be Asp or Glu
YNSGKLEEFVQGNLERECMEEKCSFEEAREVFENTERTTEFWKQYVDGDQCESNPCLNGGSCKDDINSYECWCPFGFEGKNCELDVTCNIKNGRCEQFCKNSADNKVVCSCTEGYRLAENQKSCEPAVPFPCGRVSVSQTSKLTRAETVFPDVDYVNSTEAETILDNITQSTQSFNDFTNSTXARVVGGEDAKPGQFPWQVVLNGKVDAFCGGSIVNEKWIVTAAHCVETGVKITVVAGEHNIEETEHTEQKRNVIRIIPHHNYNAAINKYNHDIALLELDEPLVLNSYVTPICIADKEYTNIFLKFGSGYVSGWGRVFHKGRSALVLQYLRVPLVDRATCLRSTKFTIYNNMFCAGFHEGGRDSCQGDSGGPHVTEVEGTSFLTGIISWGEECAMKGKYGIYTKVSRYVNWIKEKTKLT

SEQ ID NO: 100 - protein, 420 aa, Artificial
  Human Factor IX variant with O-linked glycan attachment consensus sequence inserted in the activation peptide
  misc_feature (157)..(157): Xaa can be Asp or Glu
YNSGKLEEFVQGNLERECMEEKCSFEEAREVFENTERTTEFWKQYVDGDQCESNPCLNGGSCKDDINSYECWCPFGFEGKNCELDVTCNIKNGRCEQFCKNSADNKVVCSCTEGYRLAENQKSCEPAVPFPCGRVSVSQTSKLTRAETVFPDVNSTXADYVNSTEAETILDNITQSTQSFNDFTRVVGGEDAKPGQFPWQVVLNGKVDAFCGGSIVNEKWIVTAAHCVETGVKITVVAGEHNIEETEHTEQKRNVIRIIPHHNYNAAINKYNHDIALLELDEPLVLNSYVTPICIADKEYTNIFLKFGSGYVSGWGRVFHKGRSALVLQYLRVPLVDRATCLRSTKFTIYNNMFCAGFHEGGRDSCQGDSGGPHVTEVEGTSFLTGIISWGEECAMKGKYGIYTKVSRYVNWIKEKTKLT

SEQ ID NO: 101 - protein, 420 aa, Artificial
  Human Factor IX variant with O-linked glycan attachment consensus sequence inserted in the activation peptide
  misc_feature (152)..(152): Xaa can be Asp or Glu
YNSGKLEEFVQGNLERECMEEKCSFEEAREVFENTERTTEFWKQYVDGDQCESNPCLNGGSCKDDINSYECWCPFGFEGKNCELDVTCNIKNGRCEQFCKNSADNKVVCSCTEGYRLAENQKSCEPAVPFPCGRVSVSQTSKLTRAETNSTXAVFPDVDYVNSTEAETILDNITQSTQSFNDFTRVVGGEDAKPGQFPWQVVLNGKVDAFCGGSIVNEKWIVTAAHCVETGVKITVVAGEHNIEETEHTEQKRNVIRIIPHHNYNAAINKYNHDIALLELDEPLVLNSYVTPICIADKEYTNIFLKFGSGYVSGWGRVFHKGRSALVLQYLRVPLVDRATCLRSTKFTIYNNMFCAGFHEGGRDSCQGDSGGPHVTEVEGTSFLTGIISWGEECAMKGKYGIYTKVSRYVNWIKEKTKLT

SEQ ID NO: 102 - protein, 420 aa, Artificial
  Human Factor IX variant with O-linked glycan attachment consensus sequence inserted in the activation peptide
  misc_feature (177)..(177): Xaa can be Asp or Glu
YNSGKLEEFVQGNLERECMEEKCSFEEAREVFENTERTTEFWKQYVDGDQCESNPCLNGGSCKDDINSYECWCPFGFEGKNCELDVTCNIKNGRCEQFCKNSADNKVVCSCTEGYRLAENQKSCEPAVPFPCGRVSVSQTSKLTRAETVFPDVDYVNSTEAETILDNITQSTQNSTXASFNDFTRVVGGEDAKPGQFPWQVVLNGKVDAFCGGSIVNEKWIVTAAHCVETGVKITVVAGEHNIEETEHTEQKRNVIRIIPHHNYNAAINKYNHDIALLELDEPLVLNSYVTPICIADKEYTNIFLKFGSGYVSGWGRVFHKGRSALVLQYLRVPLVDRATCLRSTKFTIYNNMFCAGFHEGGRDSCQGDSGGPHVTEVEGTSFLTGIISWGEECAMKGKYGIYTKVSRYVNWIKEKTKLT

SEQ ID NO: 103 - protein, 420 aa, Artificial
  Human Factor IX variant with O-linked glycan attachment consensus sequence inserted in the activation peptide
  misc_feature (158)..(158): Xaa can be Asp or Glu
YNSGKLEEFVQGNLERECMEEKCSFEEAREVFENTERTTEFWKQYVDGDQCESNPCLNGGSCKDDINSYECWCPFGFEGKNCELDVTCNIKNGRCEQFCKNSADNKVVCSCTEGYRLAENQKSCEPAVPFPCGRVSVSQTSKLTRAETVFPDVDNSTXAYVNSTEAETILDNITQSTQSFNDFTRVVGGEDAKPGQFPWQVVLNGKVDAFCGGSIVNEKWIVTAAHCVETGVKITVVAGEHNIEETEHTEQKRNVIRIIPHHNYNAAINKYNHDIALLELDEPLVLNSYVTPICIADKEYTNIFLKFGSGYVSGWGRVFHKGRSALVLQYLRVPLVDRATCLRSTKFTIYNNMFCAGFHEGGRDSCQGDSGGPHVTEVEGTSFLTGIISWGEECAMKGKYGIYTKVSRYVNWIKEKTKLT

SEQ ID NO: 104 - protein, 420 aa, Artificial
  Human Factor IX variant with O-linked glycan attachment consensus sequence inserted in the activation peptide
YNSGKLEEFVQGNLERECMEEKCSFEEAREVFENTERTTEFWKQYVDGDQCESNPCLNGGSCKDDINSYECWCPFGFEGKNCELDVTCNIKNGRCEQFCKNSADNKVVCSCTEGYRLAENQKSCEPAVPFPCGRVSVSQTSKLTRAETVFPDVDYVNSTEAETILDNITQSNITQSTQSFNDFTRVVGGEDAKPGQFPWQVVLNGKVDAFCGGSIVNEKWIVTAAHCVETGVKITVVAGEHNIEETEHTEQKRNVIRIIPHHNYNAAINKYNHDIALLELDEPLVLNSYVTPICIADKEYTNIFLKFGSGYVSGWGRVFHKGRSALVLQYLRVPLVDRATCLRSTKFTIYNNMFCAGFHEGGRDSCQGDSGGPHVTEVEGTSFLTGIISWGEECAMKGKYGIYTKVSRYVNWIKEKTKLT

SEQ ID NO: 105 - protein, 420 aa, Artificial
  Human Factor IX variant with O-linked glycan attachment consensus sequence inserted in the activation peptide
YNSGKLEEFVQGNLERECMEEKCSFEEAREVFENTERTTEFWKQYVDGDQCESNPCLNGGSCKDDINSYECWCPFGFEGKNCELDVTCNIKNGRCEQFCKNSADNKVVCSCTEGYRLAENQKSCEPAVPFPCGRVSVSQTSKLTRAETVFPDVDYVNSTEAETILDNITQSTQSFNDFTNITQSRVVGGEDAKPGQFPWQVVLNGKVDAFCGGSIVNEKWIVTAAHCVETGVKITVVAGEHNIEETEHTEQKRNVIRIIPHHNYNAAINKYNHDIALLELDEPLVLNSYVTPICIADKEYTNIFLKFGSGYVSGWGRVFHKGRSALVLQYLRVPLVDRATCLRSTKFTIYNNMFCAGFHEGGRDSCQGDSGGPHVTEVEGTSFLTGIISWGEECAMKGKYGIYTKVSRYVNWIKEKTKLT

SEQ ID NO: 106 - protein, 420 aa, Artificial
  Human Factor IX variant with O-linked glycan attachment consensus sequence inserted in the activation peptide
YNSGKLEEFVQGNLERECMEEKCSFEEAREVFENTERTTEFWKQYVDGDQCESNPCLNGGSCKDDINSYECWCPFGFEGKNCELDVTCNIKNGRCEQFCKNSADNKVVCSCTEGYRLAENQKSCEPAVPFPCGRVSVSQTSKLTRAENITQSTVFPDVDYVNSTEAETILDNITQSTQSFNDFTRVVGGEDAKPGQFPWQVVLNGKVDAFCGGSIVNEKWIVTAAHCVETGVKITVVAGEHNIEETEHTEQKRNVIRIIPHHNYNAAINKYNHDIALLELDEPLVLNSYVTPICIADKEYTNIFLKFGSGYVSGWGRVFHKGRSALVLQYLRVPLVDRATCLRSTKFTIYNNMFCAGFHEGGRDSCQGDSGGPHVTEVEGTSFLTGIISWGEECAMKGKYGIYTKVSRYVNWIKEKTKLT

SEQ ID NO: 107 - protein, 420 aa, Artificial
  Human Factor IX variant with O-linked glycan attachment consensus sequence inserted in the activation peptide
YNSGKLEEFVQGNLERECMEEKCSFEEAREVFENTERTTEFWKQYVDGDQCESNPCLNGGSCKDDINSYECWCPFGFEGKNCELDVTCNIKNGRCEQFCKNSADNKVVCSCTEGYRLAENQKSCEPAVPFPCGRVSVSQTSKLTRAETNITQSVFPDVDYVNSTEAETILDNITQSTQSFNDFTRVVGGEDAKPGQFPWQVVLNGKVDAFCGGSIVNEKWIVTAAHCVETGVKITVVAGEHNIEETEHTEQKRNVIRIIPHHNYNAAINKYNHDIALLELDEPLVLNSYVTPICIADKEYTNIFLKFGSGYVSGWGRVFHKGRSALVLQYLRVPLVDRATCLRSTKFTIYNNMFCAGFHEGGRDSCQGDSGGPHVTEVEGTSFLTGIISWGEECAMKGKYGIYTKVSRYVNWIKEKTKLT

SEQ ID NO: 108 - protein, 420 aa, Artificial
  Human Factor IX variant with O-linked glycan attachment consensus sequence inserted in the activation peptide
YNSGKLEEFVQGNLERECMEEKCSFEEAREVFENTERTTEFWKQYVDGDQCESNPCLNGGSCKDDINSYECWCPFGFEGKNCELDVTCNIKNGRCEQFCKNSADNKVVCSCTEGYRLAENQKSCEPAVPFPCGRVSVSQTSKLTRAETVFPDVNITQSDYVNSTEAETILDNITQSTQSFNDFTRVVGGEDAKPGQFPWQVVLNGKVDAFCGGSIVNEKWIVTAAHCVETGVKITVVAGEHNIEETEHTEQKRNVIRIIPHHNYNAAINKYNHDIALLELDEPLVLNSYVTPICIADKEYTNIFLKFGSGYVSGWGRVFHKGRSALVLQYLRVPLVDRATCLRSTKFTIYNNMFCAGFHEGGRDSCQGDSGGPHVTEVEGTSFLTGIISWGEECAMKGKYGIYTKVSRYVNWIKEKTKLT

SEQ ID NO: 109 - protein, 420 aa, Artificial
  Human Factor IX variant with O-linked glycan attachment consensus sequence inserted in the activation peptide
YNSGKLEEFVQGNLERECMEEKCSFEEAREVFENTERTTEFWKQYVDGDQCESNPCLNGGSCKDDINSYECWCPFGFEGKNCELDVTCNIKNGRCEQFCKNSADNKVVCSCTEGYRLAENQKSCEPAVPFPCGRVSVSQTSKLTRAETVFPDVDYVNSTEAENITQSTILDNITQSTQSFNDFTRVVGGEDAKPGQFPWQVVLNGKVDAFCGGSIVNEKWIVTAAHCVETGVKITVVAGEHNIEETEHTEQKRNVIRIIPHHNYNAAINKYNHDIALLELDEPLVLNSYVTPICIADKEYTNIFLKFGSGYVSGWGRVFHKGRSALVLQYLRVPLVDRATCLRSTKFTIYNNMFCAGFHEGGRDSCQGDSGGPHVTEVEGTSFLTGIISWGEECAMKGKYGIYTKVSRYVNWIKEKTKLT

SEQ ID NO: 110 - protein, 420 aa, Artificial
  Human Factor IX variant with O-linked glycan attachment consensus sequence inserted in the activation peptide
YNSGKLEEFVQGNLERECMEEKCSFEEAREVFENTERTTEFWKQYVDGDQCESNPCLNGGSCKDDINSYECWCPFGFEGKNCELDVTCNIKNGRCEQFCKNSADNKVVCSCTEGYRLAENQKSCEPAVPFPCGRVSVSQTSKLTRAETVFPDVDYVNSTEAETILDQSTQSNITQSTQSFNDFTRVVGGEDAKPGQFPWQVVLNGKVDAFCGGSIVNEKWIVTAAHCVETGVKITVVAGEHNIEETEHTEQKRNVIRIIPHHNYNAAINKYNHDIALLELDEPLVLNSYVTPICIADKEYTNIFLKFGSGYVSGWGRVFHKGRSALVLQYLRVPLVDRATCLRSTKFTIYNNMFCAGFHEGGRDSCQGDSGGPHVTEVEGTSFLTGIISWGEECAMKGKYGIYTKVSRYVNWIKEKTKLT

SEQ ID NO: 111 - protein, 420 aa, Artificial
  Human Factor IX variant with O-linked glycan attachment consensus sequence inserted in the activation peptide
YNSGKLEEFVQGNLERECMEEKCSFEEAREVFENTERTTEFWKQYVDGDQCESNPCLNGGSCKDDINSYECWCPFGFEGKNCELDVTCNIKNGRCEQFCKNSADNKVVCSCTEGYRLAENQKSCEPAVPFPCGRVSVSQTSKLTRAETVFPDVDYVNSTEAETILDNITQSTQSFNDFQSTQSTRVVGGEDAKPGQFPWQVVLNGKVDAFCGGSIVNEKWIVTAAHCVETGVKITVVAGEHNIEETEHTEQKRNVIRIIPHHNYNAAINKYNHDIALLELDEPLVLNSYVTPICIADKEYTNIFLKFGSGYVSGWGRVFHKGRSALVLQYLRVPLVDRATCLRSTKFTIYNNMFCAGFHEGGRDSCQGDSGGPHVTEVEGTSFLTGIISWGEECAMKGKYGIYTKVSRYVNWIKEKTKLT

SEQ ID NO: 112 - protein, 420 aa, Artificial
  Human Factor IX variant with O-linked glycan attachment consensus sequence inserted in the activation peptide
YNSGKLEEFVQGNLERECMEEKCSFEEAREVFENTERTTEFWKQYVDGDQCESNPCLNGGSCKDDINSYECWCPFGFEGKNCELDVTCNIKNGRCEQFCKNSADNKVVCSCTEGYRLAENQKSCEPAVPFPCGRVSVSQTSKLTRAETVFPDVQSTQSDYVNSTEAETILDNITQSTQSFNDFTRVVGGEDAKPGQFPWQVVLNGKVDAFCGGSIVNEKWIVTAAHCVETGVKITVVAGEHNIEETEHTEQKRNVIRIIPHHNYNAAINKYNHDIALLELDEPLVLNSYVTPICIADKEYTNIFLKFGSGYVSGWGRVFHKGRSALVLQYLRVPLVDRATCLRSTKFTIYNNMFCAGFHEGGRDSCQGDSGGPHVTEVEGTSFLTGIISWGEECAMKGKYGIYTKVSRYVNWIKEKTKLT

SEQ ID NO: 113 - protein, 420 aa, Artificial
  Human Factor IX variant with O-linked glycan attachment consensus sequence inserted in the activation peptide
YNSGKLEEFVQGNLERECMEEKCSFEEAREVFENTERTTEFWKQYVDGDQCESNPCLNGGSCKDDINSYECWCPFGFEGKNCELDVTCNIKNGRCEQFCKNSADNKVVCSCTEGYRLAENQKSCEPAVPFPCGRVSVSQTSKLTRAEQSTQSTVFPDVDYVNSTEAETILDNITQSTQSFNDFTRVVGGEDAKPGQFPWQVVLNGKVDAFCGGSIVNEKWIVTAAHCVETGVKITVVAGEHNIEETEHTEQKRNVIRIIPHHNYNAAINKYNHDIALLELDEPLVLNSYVTPICIADKEYTNIFLKFGSGYVSGWGRVFHKGRSALVLQYLRVPLVDRATCLRSTKFTIYNNMFCAGFHEGGRDSCQGDSGGPHVTEVEGTSFLTGIISWGEECAMKGKYGIYTKVSRYVNWIKEKTKLT

SEQ ID NO: 114 - protein, 420 aa, Artificial
  Human Factor IX variant with O-linked glycan attachment consensus sequence inserted in the activation peptide
YNSGKLEEFVQGNLERECMEEKCSFEEAREVFENTERTTEFWKQYVDGDQCESNPCLNGGSCKDDINSYECWCPFGFEGKNCELDVTCNIKNGRCEQFCKNSADNKVVCSCTEGYRLAENQKSCEPAVPFPCGRVSVSQTSKLTRAETQSTQSVFPDVDYVNSTEAETILDNITQSTQSFNDFTRVVGGEDAKPGQFPWQVVLNGKVDAFCGGSIVNEKWIVTAAHCVETGVKITVVAGEHNIEETEHTEQKRNVIRIIPHHNYNAAINKYNHDIALLELDEPLVLNSYVTPICIADKEYTNIFLKFGSGYVSGWGRVFHKGRSALVLQYLRVPLVDRATCLRSTKFTIYNNMFCAGFHEGGRDSCQGDSGGPHVTEVEGTSFLTGIISWGEECAMKGKYGIYTKVSRYVNWIKEKTKLT

SEQ ID NO: 115 - protein, 420 aa, Artificial
  Human Factor IX variant with O-linked glycan attachment consensus sequence inserted in the activation peptide
YNSGKLEEFVQGNLERECMEEKCSFEEAREVFENTERTTEFWKQYVDGDQCESNPCLNGGSCKDDINSYECWCPFGFEGKNCELDVTCNIKNGRCEQFCKNSADNKVVCSCTEGYRLAENQKSCEPAVPFPCGRVSVSQTSKLTRAETVFPDVDYVNSTEQSTQSAETILDNITQSTQSFNDFTRVVGGEDAKPGQFPWQVVLNGKVDAFCGGSIVNEKWIVTAAHCVETGVKITVVAGEHNIEETEHTEQKRNVIRIIPHHNYNAAINKYNHDIALLELDEPLVLNSYVTPICIADKEYTNIFLKFGSGYVSGWGRVFHKGRSALVLQYLRVPLVDRATCLRSTKFTIYNNMFCAGFHEGGRDSCQGDSGGPHVTEVEGTSFLTGIISWGEECAMKGKYGIYTKVSRYVNWIKEKTKLT

SEQ ID NO: 116 - protein, 420 aa, Artificial
  Human Factor IX variant with O-linked glycan attachment consensus sequence inserted in the activation peptide
  misc_feature (167)..(167): Xaa can be Asp or Glu
  misc_feature (170)..(170): Xaa can be Arg or Lys
YNSGKLEEFVQGNLERECMEEKCSFEEAREVFENTERTTEFWKQYVDGDQCESNPCLNGGSCKDDINSYECWCPFGFEGKNCELDVTCNIKNGRCEQFCKNSADNKVVCSCTEGYRLAENQKSCEPAVPFPCGRVSVSQTSKLTRAETVFPDVDYVNSTEAETILDXFTXVNITQSTQSFNDFTRVVGGEDAKPGQFPWQVVLNGKVDAFCGGSIVNEKWIVTAAHCVETGVKITVVAGEHNIEETEHTEQKRNVIRIIPHHNYNAAINKYNHDIALLELDEPLVLNSYVTPICIADKEYTNIFLKFGSGYVSGWGRVFHKGRSALVLQYLRVPLVDRATCLRSTKFTIYNNMFCAGFHEGGRDSCQGDSGGPHVTEVEGTSFLTGIISWGEECAMKGKYGIYTKVSRYVNWIKEKTKLT

SEQ ID NO: 117 - protein, 420 aa, Artificial
  Human Factor IX variant with O-linked glycan attachment consensus sequence inserted in the activation peptide
  misc_feature (179)..(179): Xaa can be Asp or Glu
  misc_feature (182)..(182): Xaa can be Arg or Lys
YNSGKLEEFVQGNLERECMEEKCSFEEAREVFENTERTTEFWKQYVDGDQCESNPCLNGGSCKDDINSYECWCPFGFEGKNCELDVTCNIKNGRCEQFCKNSADNKVVCSCTEGYRLAENQKSCEPAVPFPCGRVSVSQTSKLTRAETVFPDVDYVNSTEAETILDNITQSTQSFNDFXFTXVTRVVGGEDAKPGQFPWQVVLNGKVDAFCGGSIVNEKWIVTAAHCVETGVKITVVAGEHNIEETEHTEQKRNVIRIIPHHNYNAAINKYNHDIALLELDEPLVLNSYVTPICIADKEYTNIFLKFGSGYVSGWGRVFHKGRSALVLQYLRVPLVDRATCLRSTKFTIYNNMFCAGFHEGGRDSCQGDSGGPHVTEVEGTSFLTGIISWGEECAMKGKYGIYTKVSRYVNWIKEKTKLT

SEQ ID NO: 118 - protein, 420 aa, Artificial
  Human Factor IX variant with O-linked glycan attachment consensus sequence inserted in the activation peptide
  misc_feature (149)..(149): Xaa can be Asp or Glu
  misc_feature (152)..(152): Xaa can be Arg or Lys
YNSGKLEEFVQGNLERECMEEKCSFEEAREVFENTERTTEFWKQYVDGDQCESNPCLNGGSCKDDINSYECWCPFGFEGKNCELDVTCNIKNGRCEQFCKNSADNKVVCSCTEGYRLAENQKSCEPAVPFPCGRVSVSQTSKLTRAETXFTXVVFPDVDYVNSTEAETILDNITQSTQSFNDFTRVVGGEDAKPGQFPWQVVLNGKVDAFCGGSIVNEKWIVTAAHCVETGVKITVVAGEHNIEETEHTEQKRNVIRIIPHHNYNAAINKYNHDIALLELDEPLVLNSYVTPICIADKEYTNIFLKFGSGYVSGWGRVFHKGRSALVLQYLRVPLVDRATCLRSTKFTIYNNMFCAGFHEGGRDSCQGDSGGPHVTEVEGTSFLTGIISWGEECAMKGKYGIYTKVSRYVNWIKEKTKLT

SEQ ID NO: 119 - protein, 420 aa, Artificial
  Human Factor IX variant with O-linked glycan attachment consensus sequence inserted in the activation peptide
  misc_feature (148)..(148): Xaa can be Asp or Glu
  misc_feature (151)..(151): Xaa can be Arg or Lys
YNSGKLEEFVQGNLERECMEEKCSFEEAREVFENTERTTEFWKQYVDGDQCESNPCLNGGSCKDDINSYECWCPFGFEGKNCELDVTCNIKNGRCEQFCKNSADNKVVCSCTEGYRLAENQKSCEPAVPFPCGRVSVSQTSKLTRAEXFTXVTVFPDVDYVNSTEAETILDNITQSTQSFNDFTRVVGGEDAKPGQFPWQVVLNGKVDAFCGGSIVNEKWIVTAAHCVETGVKITVVAGEHNIEETEHTEQKRNVIRIIPHHNYNAAINKYNHDIALLELDEPLVLNSYVTPICIADKEYTNIFLKFGSGYVSGWGRVFHKGRSALVLQYLRVPLVDRATCLRSTKFTIYNNMFCAGFHEGGRDSCQGDSGGPHVTEVEGTSFLTGIISWGEECAMKGKYGIYTKVSRYVNWIKEKTKLT

SEQ ID NO: 120 - protein, 420 aa, Artificial
  Human Factor IX variant with O-linked glycan attachment consensus sequence inserted in the activation peptide
  misc_feature (154)..(154): Xaa can be Asp or Glu
  misc_feature (157)..(157): Xaa can be Arg or Lys
YNSGKLEEFVQGNLERECMEEKCSFEEAREVFENTERTTEFWKQYVDGDQCESNPCLNGGSCKDDINSYECWCPFGFEGKNCELDVTCNIKNGRCEQFCKNSADNKVVCSCTEGYRLAENQKSCEPAVPFPCGRVSVSQTSKLTRAETVFPDVXFTXVDYVNSTEAETILDNITQSTQSFNDFTRVVGGEDAKPGQFPWQVVLNGKVDAFCGGSIVNEKWIVTAAHCVETGVKITVVAGEHNIEETEHTEQKRNVIRIIPHHNYNAAINKYNHDIALLELDEPLVLNSYVTPICIADKEYTNIFLKFGSGYVSGWGRVFHKGRSALVLQYLRVPLVDRATCLRSTKFTIYNNMFCAGFHEGGRDSCQGDSGGPHVTEVEGTSFLTGIISWGEECAMKGKYGIYTKVSRYVNWIKEKTKLT

SEQ ID NO: 121 - protein, 419 aa, Artificial
  Human Factor IX variant with O-linked glycan attachment consensus sequence inserted in the activation peptide
  misc_feature (168)..(168): Xaa can be Asp or Glu
YNSGKLEEFVQGNLERECMEEKCSFEEAREVFENTERTTEFWKQYVDGDQCESNPCLNGGSCKDDINSYECWCPFGFEGKNCELDVTCNIKNGRCEQFCKNSADNKVVCSCTEGYRLAENQKSCEPAVPFPCGRVSVSQTSKLTRAETVFPDVDYVNSTEAETILDCXSNNITQSTQSFNDFTRVVGGEDAKPGQFPWQVVLNGKVDAFCGGSIVNEKWIVTAAHCVETGVKITVVAGEHNIEETEHTEQKRNVIRIIPHHNYNAAINKYNHDIALLELDEPLVLNSYVTPICIADKEYTNIFLKFGSGYVSGWGRVFHKGRSALVLQYLRVPLVDRATCLRSTKFTIYNNMFCAGFHEGGRDSCQGDSGGPHVTEVEGTSFLTGIISWGEECAMKGKYGIYTKVSRYVNWIKEKTKLT

SEQ ID NO: 122 - protein, 419 aa, Artificial
  Human Factor IX variant with O-linked glycan attachment consensus sequence inserted in the activation peptide
  misc_feature (180)..(180): Xaa can be Asp or Glu
YNSGKLEEFVQGNLERECMEEKCSFEEAREVFENTERTTEFWKQYVDGDQCESNPCLNGGSCKDDINSYECWCPFGFEGKNCELDVTCNIKNGRCEQFCKNSADNKVVCSCTEGYRLAENQKSCEPAVPFPCGRVSVSQTSKLTRAETVFPDVDYVNSTEAETILDNITQSTQSFNDFCXSNTRVVGGEDAKPGQFPWQVVLNGKVDAFCGGSIVNEKWIVTAAHCVETGVKITVVAGEHNIEETEHTEQKRNVIRIIPHHNYNAAINKYNHDIALLELDEPLVLNSYVTPICIADKEYTNIFLKFGSGYVSGWGRVFHKGRSALVLQYLRVPLVDRATCLRSTKFTIYNNMFCAGFHEGGRDSCQGDSGGPHVTEVEGTSFLTGIISWGEECAMKGKYGIYTKVSRYVNWIKEKTKLT

SEQ ID NO: 123 - protein, 419 aa, Artificial
  Human Factor IX variant with O-linked glycan attachment consensus sequence inserted in the activation peptide
  misc_feature (149)..(149): Xaa can be Asp or Glu
YNSGKLEEFVQGNLERECMEEKCSFEEAREVFENTERTTEFWKQYVDGDQCESNPCLNGGSCKDDINSYECWCPFGFEGKNCELDVTCNIKNGRCEQFCKNSADNKVVCSCTEGYRLAENQKSCEPAVPFPCGRVSVSQTSKLTRAECXSNTVFPDVDYVNSTEAETILDNITQSTQSFNDFTRVVGGEDAKPGQFPWQVVLNGKVDAFCGGSIVNEKWIVTAAHCVETGVKITVVAGEHNIEETEHTEQKRNVIRIIPHHNYNAAINKYNHDIALLELDEPLVLNSYVTPICIADKEYTNIFLKFGSGYVSGWGRVFHKGRSALVLQYLRVPLVDRATCLRSTKFTIYNNMFCAGFHEGGRDSCQGDSGGPHVTEVEGTSFLTGIISWGEECAMKGKYGIYTKVSRYVNWIKEKTKLT

SEQ ID NO: 124 - protein, 419 aa, Artificial
  Human Factor IX variant with O-linked glycan attachment consensus sequence inserted in the activation peptide
  misc_feature (150)..(150): Xaa can be Asp or Glu
YNSGKLEEFVQGNLERECMEEKCSFEEAREVFENTERTTEFWKQYVDGDQCESNPCLNGGSCKDDINSYECWCPFGFEGKNCELDVTCNIKNGRCEQFCKNSADNKVVCSCTEGYRLAENQKSCEPAVPFPCGRVSVSQTSKLTRAETCXSNVFPDVDYVNSTEAETILDNITQSTQSFNDFTRVVGGEDAKPGQFPWQVVLNGKVDAFCGGSIVNEKWIVTAAHCVETGVKITVVAGEHNIEETEHTEQKRNVIRIIPHHNYNAAINKYNHDIALLELDEPLVLNSYVTPICIADKEYTNIFLKFGSGYVSGWGRVFHKGRSALVLQYLRVPLVDRATCLRSTKFTIYNNMFCAGFHEGGRDSCQGDSGGPHVTEVEGTSFLTGIISWGEECAMKGKYGIYTKVSRYVNWIKEKTKLT

SEQ ID NO: 125 - protein, 419 aa, Artificial
  Human Factor IX variant with O-linked glycan attachment consensus sequence inserted in the activation peptide
  misc_feature (155)..(155): Xaa can be Asp or Glu
YNSGKLEEFVQGNLERECMEEKCSFEEAREVFENTERTTEFWKQYVDGDQCESNPCLNGGSCKDDINSYECWCPFGFEGKNCELDVTCNIKNGRCEQFCKNSADNKVVCSCTEGYRLAENQKSCEPAVPFPCGRVSVSQTSKLTRAETVFPDVCXSNDYVNSTEAETILDNITQSTQSFNDFTRVVGGEDAKPGQFPWQVVLNGKVDAFCGGSIVNEKWIVTAAHCVETGVKITVVAGEHNIEETEHTEQKRNVIRIIPHHNYNAAINKYNHDIALLELDEPLVLNSYVTPICIADKEYTNIFLKFGSGYVSGWGRVFHKGRSALVLQYLRVPLVDRATCLRSTKFTIYNNMFCAGFHEGGRDSCQGDSGGPHVTEVEGTSFLTGIISWGEECAMKGKYGIYTKVSRYVNWIKEKTKLT

SEQ ID NO: 126 - protein, 419 aa, Artificial
  Human Factor IX variant with O-linked glycan attachment consensus sequence inserted in the activation peptide
  misc_feature (175)..(175): Xaa can be Asp or Glu
YNSGKLEEFVQGNLERECMEEKCSFEEAREVFENTERTTEFWKQYVDGDQCESNPCLNGGSCKDDINSYECWCPFGFEGKNCELDVTCNIKNGRCEQFCKNSADNKVVCSCTEGYRLAENQKSCEPAVPFPCGRVSVSQTSKLTRAETVFPDVDYVNSTEAETILDNITQSTQCXSNSFNDFTRVVGGEDAKPGQFPWQVVLNGKVDAFCGGSIVNEKWIVTAAHCVETGVKITVVAGEHNIEETEHTEQKRNVIRIIPHHNYNAAINKYNHDIALLELDEPLVLNSYVTPICIADKEYTNIFLKFGSGYVSGWGRVFHKGRSALVLQYLRVPLVDRATCLRSTKFTIYNNMFCAGFHEGGRDSCQGDSGGPHVTEVEGTSFLTGIISWGEECAMKGKYGIYTKVSRYVNWIKEKTKLT

SEQ ID NO: 127 - protein, 420 aa, Artificial
  Human Factor IX variant with O-linked glycan attachment consensus sequence inserted in the activation peptide
  misc_feature (171)..(171): Xaa can be Arg or Lys
YNSGKLEEFVQGNLERECMEEKCSFEEAREVFENTERTTEFWKQYVDGDQCESNPCLNGGSCKDDINSYECWCPFGFEGKNCELDVTCNIKNGRCEQFCKNSADNKVVCSCTEGYRLAENQKSCEPAVPFPCGRVSVSQTSKLTRAETVFPDVDYVNSTEAETILDGGSCXNITQSTQSFNDFTRVVGGEDAKPGQFPWQVVLNGKVDAFCGGSIVNEKWIVTAAHCVETGVKITVVAGEHNIEETEHTEQKRNVIRIIPHHNYNAAINKYNHDIALLELDEPLVLNSYVTPICIADKEYTNIFLKFGSGYVSGWGRVFHKGRSALVLQYLRVPLVDRATCLRSTKFTIYNNMFCAGFHEGGRDSCQGDSGGPHVTEVEGTSFLTGIISWGEECAMKGKYGIYTKVSRYVNWIKEKTKLT

SEQ ID NO: 128 - protein, 420 aa, Artificial
  Human Factor IX variant with O-linked glycan attachment consensus sequence inserted in the activation peptide
  misc_feature (183)..(183): Xaa can be Arg or Lys
YNSGKLEEFVQGNLERECMEEKCSFEEAREVFENTERTTEFWKQYVDGDQCESNPCLNGGSCKDDINSYECWCPFGFEGKNCELDVTCNIKNGRCEQFCKNSADNKVVCSCTEGYRLAENQKSCEPAVPFPCGRVSVSQTSKLTRAETVFPDVDYVNSTEAETILDNITQSTQSFNDFGGSCXTRVVGGEDAKPGQFPWQVVLNGKVDAFCGGSIVNEKWIVTAAHCVETGVKITVVAGEHNIEETEHTEQKRNVIRIIPHHNYNAAINKYNHDIALLELDEPLVLNSYVTPICIADKEYTNIFLKFGSGYVSGWGRVFHKGRSALVLQYLRVPLVDRATCLRSTKFTIYNNMFCAGFHEGGRDSCQGDSGGPHVTEVEGTSFLTGIISWGEECAMKGKYGIYTKVSRYVNWIKEKTKLT

SEQ ID NO: 129 - protein, 420 aa, Artificial
  Human Factor IX variant with O-linked glycan attachment consensus sequence inserted in the activation peptide
  misc_feature (152)..(152): Xaa can be Arg or Lys
YNSGKLEEFVQGNLERECMEEKCSFEEAREVFENTERTTEFWKQYVDGDQCESNPCLNGGSCKDDINSYECWCPFGFEGKNCELDVTCNIKNGRCEQFCKNSADNKVVCSCTEGYRLAENQKSCEPAVPFPCGRVSVSQTSKLTRAEGGSCXTVFPDVDYVNSTEAETILDNITQSTQSFNDFTRVVGGEDAKPGQFPWQVVLNGKVDAFCGGSIVNEKWIVTAAHCVETGVKITVVAGEHNIEETEHTEQKRNVIRIIPHHNYNAAINKYNHDIALLELDEPLVLNSYVTPICIADKEYTNIFLKFGSGYVSGWGRVFHKGRSALVLQYLRVPLVDRATCLRSTKFTIYNNMFCAGFHEGGRDSCQGDSGGPHVTEVEGTSFLTGIISWGEECAMKGKYGIYTKVSRYVNWIKEKTKLT

SEQ ID NO: 130 - protein, 420 aa, Artificial
  Human Factor IX variant with O-linked glycan attachment consensus sequence inserted in the activation peptide
  misc_feature (153)..(153): Xaa can be Arg or Lys
YNSGKLEEFVQGNLERECMEEKCSFEEAREVFENTERTTEFWKQYVDGDQCESNPCLNGGSCKDDINSYECWCPFGFEGKNCELDVTCNIKNGRCEQFCKNSADNKVVCSCTEGYRLAENQKSCEPAVPFPCGRVSVSQTSKLTRAETGGSCXVFPDVDYVNSTEAETILDNITQSTQSFNDFTRVVGGEDAKPGQFPWQVVLNGKVDAFCGGSIVNEKWIVTAAHCVETGVKITVVAGEHNIEETEHTEQKRNVIRIIPHHNYNAAINKYNHDIALLELDEPLVLNSYVTPICIADKEYTNIFLKFGSGYVSGWGRVFHKGRSALVLQYLRVPLVDRATCLRSTKFTIYNNMFCAGFHEGGRDSCQGDSGGPHVTEVEGTSFLTGIISWGEECAMKGKYGIYTKVSRYVNWIKEKTKLT

SEQ ID NO: 131 - protein, 420 aa, Artificial
  Human Factor IX variant with O-linked glycan attachment consensus sequence inserted in the activation peptide
  misc_feature (158)..(158): Xaa can be Arg or Lys
YNSGKLEEFVQGNLERECMEEKCSFEEAREVFENTERTTEFWKQYVDGDQCESNPCLNGGSCKDDINSYECWCPFGFEGKNCELDVTCNIKNGRCEQFCKNSADNKVVCSCTEGYRLAENQKSCEPAVPFPCGRVSVSQTSKLTRAETVFPDVGGSCXDYVNSTEAETILDNITQSTQSFNDFTRVVGGEDAKPGQFPWQVVLNGKVDAFCGGSIVNEKWIVTAAHCVETGVKITVVAGEHNIEETEHTEQKRNVIRIIPHHNYNAAINKYNHDIALLELDEPLVLNSYVTPICIADKEYTNIFLKFGSGYVSGWGRVFHKGRSALVLQYLRVPLVDRATCLRSTKFTIYNNMFCAGFHEGGRDSCQGDSGGPHVTEVEGTSFLTGIISWGEECAMKGKYGIYTKVSRYVNWIKEKTKLT

SEQ ID NO: 132 - protein, 420 aa, Artificial
  Human Factor IX variant with O-linked glycan attachment consensus sequence inserted in the activation peptide
  misc_feature (176)..(176): Xaa can be Arg or Lys
YNSGKLEEFVQGNLERECMEEKCSFEEAREVFENTERTTEFWKQYVDGDQCESNPCLNGGSCKDDINSYECWCPFGFEGKNCELDVTCNIKNGRCEQFCKNSADNKVVCSCTEGYRLAENQKSCEPAVPFPCGRVSVSQTSKLTRAETVFPDVDYVNSTEAETILDNITQSGGSCXTQSFNDFTRVVGGEDAKPGQFPWQVVLNGKVDAFCGGSIVNEKWIVTAAHCVETGVKITVVAGEHNIEETEHTEQKRNVIRIIPHHNYNAAINKYNHDIALLELDEPLVLNSYVTPICIADKEYTNIFLKFGSGYVSGWGRVFHKGRSALVLQYLRVPLVDRATCLRSTKFTIYNNMFCAGFHEGGRDSCQGDSGGPHVTEVEGTSFLTGIISWGEECAMKGKYGIYTKVSRYVNWIKEKTKLT

SEQ ID NO: 133 - protein, 44 aa, Artificial
  Human Factor IX variant activation peptide sequence with N-linked glycosylation site inserted
AETVFPDVDYVNSTEAETILDNITDGAILNNITQSTQSFNDFTR

SEQ ID NO: 134 - protein, 47 aa, Artificial
  Human Factor IX variant activation peptide sequence with random amino acid sequence inserted
AETVFPDVDYVNSTEAFLNCCPGCCMEPETILDNITQSTQSFNDFTR

SEQ ID NO: 135 - protein, 418 aa, Artificial
  Human Factor IX variant with N-linked glycan attachment consensus sequence inserted
  misc_feature (16)..(16): Xaa can be any amino acid except Pro
  misc_feature (17)..(17): Xaa can be Ser or Thr
YNSGKLEEFVQGNLNXXERECMEEKCSFEEAREVFENTERTTEFWKQYVDGDQCESNPCLNGGSCKDDINSYECWCPFGFEGKNCELDVTCNIKNGRCEQFCKNSADNKVVCSCTEGYRLAENQKSCEPAVPFPCGRVSVSQTSKLTRAETVFPDVDYVNSTEAETILDNITQSTQSFNDFTRVVGGEDAKPGQFPWQVVLNGKVDAFCGGSIVNEKWIVTAAHCVETGVKITVVAGEHNIEETEHTEQKRNVIRIIPHHNYNAAINKYNHDIALLELDEPLVLNSYVTPICIADKEYTNIFLKFGSGYVSGWGRVFHKGRSALVLQYLRVPLVDRATCLRSTKFTIYNNMFCAGFHEGGRDSCQGDSGGPHVTEVEGTSFLTGIISWGEECAMKGKYGIYTKVSRYVNWIKEKTKLT

SEQ ID NO: 136 - protein, 418 aa, Artificial
  Human Factor IX variant with N-linked glycan attachment consensus sequence inserted
  misc_feature (17)..(17): Xaa can be any amino acid except Pro
  misc_feature (18)..(18): Xaa can be Ser or Thr
YNSGKLEEFVQGNLENXXRECMEEKCSFEEAREVFENTERTTEFWKQYVDGDQCESNPCLNGGSCKDDINSYECWCPFGFEGKNCELDVTCNIKNGRCEQFCKNSADNKVVCSCTEGYRLAENQKSCEPAVPFPCGRVSVSQTSKLTRAETVFPDVDYVNSTEAETILDNITQSTQSFNDFTRVVGGEDAKPGQFPWQVVLNGKVDAFCGGSIVNEKWIVTAAHCVETGVKITVVAGEHNIEETEHTEQKRNVIRIIPHHNYNAAINKYNHDIALLELDEPLVLNSYVTPICIADKEYTNIFLKFGSGYVSGWGRVFHKGRSALVLQYLRVPLVDRATCLRSTKFTIYNNMFCAGFHEGGRDSCQGDSGGPHVTEVEGTSFLTGIISWGEECAMKGKYGIYTKVSRYVNWIKEKTKLT

SEQ ID NO: 137 - protein, 418 aa, Artificial
  Human Factor IX variant with N-linked glycan attachment consensus sequence inserted
  misc_feature (18)..(18): Xaa can be any amino acid except Pro
  misc_feature (19)..(19): Xaa can be Ser or Thr
YNSGKLEEFVQGNLERNXXECMEEKCSFEEAREVFENTERTTEFWKQYVDGDQCESNPCLNGGSCKDDINSYECWCPFGFEGKNCELDVTCNIKNGRCEQFCKNSADNKVVCSCTEGYRLAENQKSCEPAVPFPCGRVSVSQTSKLTRAETVFPDVDYVNSTEAETILDNITQSTQSFNDFTRVVGGEDAKPGQFPWQVVLNGKVDAFCGGSIVNEKWIVTAAHCVETGVKITVVAGEHNIEETEHTEQKRNVIRIIPHHNYNAAINKYNHDIALLELDEPLVLNSYVTPICIADKEYTNIFLKFGSGYVSGWGRVFHKGRSALVLQYLRVPLVDRATCLRSTKFTIYNNMFCAGFHEGGRDSCQGDSGGPHVTEVEGTSFLTGIISWGEECAMKGKYGIYTKVSRYVNWIKEKTKLT

SEQ ID NO: 138 - protein, 418 aa, Artificial
  Human Factor IX variant with N-linked glycan attachment consensus sequence inserted
  misc_feature (31)..(31): Xaa can be any amino acid except Pro
  misc_feature (32)..(32): Xaa can be Ser or Thr
YNSGKLEEFVQGNLERECMEEKCSFEEARNXXEVFENTERTTEFWKQYVDGDQCESNPCLNGGSCKDDINSYECWCPFGFEGKNCELDVTCNIKNGRCEQFCKNSADNKVVCSCTEGYRLAENQKSCEPAVPFPCGRVSVSQTSKLTRAETVFPDVDYVNSTEAETILDNITQSTQSFNDFTRVVGGEDAKPGQFPWQVVLNGKVDAFCGGSIVNEKWIVTAAHCVETGVKITVVAGEHNIEETEHTEQKRNVIRIIPHHNYNAAINKYNHDIALLELDEPLVLNSYVTPICIADKEYTNIFLKFGSGYVSGWGRVFHKGRSALVLQYLRVPLVDRATCLRSTKFTIYNNMFCAGFHEGGRDSCQGDSGGPHVTEVEGTSFLTGIISWGEECAMKGKYGIYTKVSRYVNWIKEKTKLT

SEQ ID NO: 139 - protein, 418 aa, Artificial
  Human Factor IX variant with N-linked glycan attachment consensus sequence inserted
  misc_feature (32)..(32): Xaa can be any amino acid except Pro
  misc_feature (33)..(33): Xaa can be Ser or Thr
YNSGKLEEFVQGNLERECMEEKCSFEEARENXXVFENTERTTEFWKQYVDGDQCESNPCLNGGSCKDDINSYECWCPFGFEGKNCELDVTCNIKNGRCEQFCKNSADNKVVCSCTEGYRLAENQKSCEPAVPFPCGRVSVSQTSKLTRAETVFPDVDYVNSTEAETILDNITQSTQSFNDFTRVVGGEDAKPGQFPWQVVLNGKVDAFCGGSIVNEKWIVTAAHCVETGVKITVVAGEHNIEETEHTEQKRNVIRIIPHHNYNAAINKYNHDIALLELDEPLVLNSYVTPICIADKEYTNIFLKFGSGYVSGWGRVFHKGRSALVLQYLRVPLVDRATCLRSTKFTIYNNMFCAGFHEGGRDSCQGDSGGPHVTEVEGTSFLTGIISWGEECAMKGKYGIYTKVSRYVNWIKEKTKLT

SEQ ID NO: 140 - protein, 418 aa, Artificial
  Human Factor IX variant with N-linked glycan attachment consensus sequence inserted
  misc_feature (33)..(33): Xaa can be any amino acid except Pro
  misc_feature (34)..(34): Xaa can be Ser or Thr
YNSGKLEEFVQGNLERECMEEKCSFEEAREVNXXFENTERTTEFWKQYVDGDQCESNPCLNGGSCKDDINSYECWCPFGFEGKNCELDVTCNIKNGRCEQFCKNSADNKVVCSCTEGYRLAENQKSCEPAVPFPCGRVSVSQTSKLTRAETVFPDVDYVNSTEAETILDNITQSTQSFNDFTRVVGGEDAKPGQFPWQVVLNGKVDAFCGGSIVNEKWIVTAAHCVETGVKITVVAGEHNIEETEHTEQKRNVIRIIPHHNYNAAINKYNHDIALLELDEPLVLNSYVTPICIADKEYTNIFLKFGSGYVSGWGRVFHKGRSALVLQYLRVPLVDRATCLRSTKFTIYNNMFCAGFHEGGRDSCQGDSGGPHVTEVEGTSFLTGIISWGEECAMKGKYGIYTKVSRYVNWIKEKTKLT

SEQ ID NO: 141 - protein, 418 aa, Artificial
  Human Factor IX variant with N-linked glycan attachment consensus sequence inserted
  misc_feature (34)..(34): Xaa can be any amino acid except Pro
  misc_feature (35)..(35): Xaa can be Ser or Thr
YNSGKLEEFVQGNLERECMEEKCSFEEAREVFNXXENTERTTEFWKQYVDGDQCESNPCLNGGSCKDDINSYECWCPFGFEGKNCELDVTCNIKNGRCEQFCKNSADNKVVCSCTEGYRLAENQKSCEPAVPFPCGRVSVSQTSKLTRAETVFPDVDYVNSTEAETILDNITQSTQSFNDFTRVVGGEDAKPGQFPWQVVLNGKVDAFCGGSIVNEKWIVTAAHCVETGVKITVVAGEHNIEETEHTEQKRNVIRIIPHHNYNAAINKYNHDIALLELDEPLVLNSYVTPICIADKEYTNIFLKFGSGYVSGWGRVFHKGRSALVLQYLRVPLVDRATCLRSTKFTIYNNMFCAGFHEGGRDSCQGDSGGPHVTEVEGTSFLTGIISWGEECAMKGKYGIYTKVSRYVNWIKEKTKLT

SEQ ID NO: 142 - protein, 418 aa, Artificial
  Human Factor IX variant with N-linked glycan attachment consensus sequence inserted
  misc_feature (35)..(35): Xaa can be any amino acid except Pro
  misc_feature (36)..(36): Xaa can be Ser or Thr
YNSGKLEEFVQGNLERECMEEKCSFEEAREVFENXXNTERTTEFWKQYVDGDQCESNPCLNGGSCKDDINSYECWCPFGFEGKNCELDVTCNIKNGRCEQFCKNSADNKVVCSCTEGYRLAENQKSCEPAVPFPCGRVSVSQTSKLTRAETVFPDVDYVNSTEAETILDNITQSTQSFNDFTRVVGGEDAKPGQFPWQVVLNGKVDAFCGGSIVNEKWIVTAAHCVETGVKITVVAGEHNIEETEHTEQKRNVIRIIPHHNYNAAINKYNHDIALLELDEPLVLNSYVTPICIADKEYTNIFLKFGSGYVSGWGRVFHKGRSALVLQYLRVPLVDRATCLRSTKFTIYNNMFCAGFHEGGRDSCQGDSGGPHVTEVEGTSFLTGIISWGEECAMKGKYGIYTKVSRYVNWIKEKTKLT

SEQ ID NO: 143 - protein, 418 aa, Artificial
  Human Factor IX variant with N-linked glycan attachment consensus sequence inserted
  misc_feature (36)..(36): Xaa can be any amino acid except Pro
  misc_feature (37)..(37): Xaa can be Ser or Thr
YNSGKLEEFVQGNLERECMEEKCSFEEAREVFENNXXTERTTEFWKQYVDGDQCESNPCLNGGSCKDDINSYECWCPFGFEGKNCELDVTCNIKNGRCEQFCKNSADNKVVCSCTEGYRLAENQKSCEPAVPFPCGRVSVSQTSKLTRAETVFPDVDYVNSTEAETILDNITQSTQSFNDFTRVVGGEDAKPGQFPWQVVLNGKVDAFCGGSIVNEKWIVTAAHCVETGVKITVVAGEHNIEETEHTEQKRNVIRIIPHHNYNAAINKYNHDIALLELDEPLVLNSYVTPICIADKEYTNIFLKFGSGYVSGWGRVFHKGRSALVLQYLRVPLVDRATCLRSTKFTIYNNMFCAGFHEGGRDSCQGDSGGPHVTEVEGTSFLTGIISWGEECAMKGKYGIYTKVSRYVNWIKEKTKLT

SEQ ID NO: 144 - protein, 418 aa, Artificial
  Human Factor IX variant with N-linked glycan attachment consensus sequence inserted
  misc_feature (37)..(37): Xaa can be any amino acid except Pro
  misc_feature (38)..(38): Xaa can be Ser or Thr
YNSGKLEEFVQGNLERECMEEKCSFEEAREVFENTNXXERTTEFWKQYVDGDQCESNPCLNGGSCKDDINSYECWCPFGFEGKNCELDVTCNIKNGRCEQFCKNSADNKVVCSCTEGYRLAENQKSCEPAVPFPCGRVSVSQTSKLTRAETVFPDVDYVNSTEAETILDNITQSTQSFNDFTRVVGGEDAKPGQFPWQVVLNGKVDAFCGGSIVNEKWIVTAAHCVETGVKITVVAGEHNIEETEHTEQKRNVIRIIPHHNYNAAINKYNHDIALLELDEPLVLNSYVTPICIADKEYTNIFLKFGSGYVSGWGRVFHKGRSALVLQYLRVPLVDRATCLRSTKFTIYNNMFCAGFHEGGRDSCQGDSGGPHVTEVEGTSFLTGIISWGEECAMKGKYGIYTKVSRYVNWIKEKTKLT

SEQ ID NO: 145 - protein, 418 aa, Artificial
  Human Factor IX variant with N-linked glycan attachment consensus sequence inserted
  misc_feature (38)..(38): Xaa can be any amino acid except Pro
  misc_feature (39)..(39): Xaa can be Ser or Thr
YNSGKLEEFVQGNLERECMEEKCSFEEAREVFENTENXXRTTEFWKQYVDGDQCESNPCLNGGSCKDDINSYECWCPFGFEGKNCELDVTCNIKNGRCEQFCKNSADNKVVCSCTEGYRLAENQKSCEPAVPFPCGRVSVSQTSKLTRAETVFPDVDYVNSTEAETILDNITQSTQSFNDFTRVVGGEDAKPGQFPWQVVLNGKVDAFCGGSIVNEKWIVTAAHCVETGVKITVVAGEHNIEETEHTEQKRNVIRIIPHHNYNAAINKYNHDIALLELDEPLVLNSYVTPICIADKEYTNIFLKFGSGYVSGWGRVFHKGRSALVLQYLRVPLVDRATCLRSTKFTIYNNMFCAGFHEGGRDSCQGDSGGPHVTEVEGTSFLTGIISWGEECAMKGKYGIYTKVSRYVNWIKEKTKLT

SEQ ID NO: 146 - protein, 418 aa, Artificial
  Human Factor IX variant with N-linked glycan attachment consensus sequence inserted
  misc_feature (39)..(39): Xaa can be any amino acid except Pro
  misc_feature (40)..(40): Xaa can be Ser or Thr
YNSGKLEEFVQGNLERECMEEKCSFEEAREVFENTERNXXTTEFWKQYVDGDQCESNPCLNGGSCKDDINSYECWCPFGFEGKNCELDVTCNIKNGRCEQFCKNSADNKVVCSCTEGYRLAENQKSCEPAVPFPCGRVSVSQTSKLTRAETVFPDVDYVNSTEAETILDNITQSTQSFNDFTRVVGGEDAKPGQFPWQVVLNGKVDAFCGGSIVNEKWIVTAAHCVETGVKITVVAGEHNIEETEHTEQKRNVIRIIPHHNYNAAINKYNHDIALLELDEPLVLNSYVTPICIADKEYTNIFLKFGSGYVSGWGRVFHKGRSALVLQYLRVPLVDRATCLRSTKFTIYNNMFCAGFHEGGRDSCQGDSGGPHVTEVEGTSFLTGIISWGEECAMKGKYGIYTKVSRYVNWIKEKTKLT

SEQ ID NO: 147 - protein, 418 aa, Artificial
  Human Factor IX variant with N-linked glycan attachment consensus sequence inserted
  misc_feature (44)..(44): Xaa can be any amino acid except Pro
  misc_feature (45)..(45): Xaa can be Ser or Thr
YNSGKLEEFVQGNLERECMEEKCSFEEAREVFENTERTTEFWNXXKQYVDGDQCESNPCLNGGSCKDDINSYECWCPFGFEGKNCELDVTCNIKNGRCEQFCKNSADNKVVCSCTEGYRLAENQKSCEPAVPFPCGRVSVSQTSKLTRAETVFPDVDYVNSTEAETILDNITQSTQSFNDFTRVVGGEDAKPGQFPWQVVLNGKVDAFCGGSIVNEKWIVTAAHCVETGVKITVVAGEHNIEETEHTEQKRNVIRIIPHHNYNAAINKYNHDIALLELDEPLVLNSYVTPICIADKEYTNIFLKFGSGYVSGWGRVFHKGRSALVLQYLRVPLVDRATCLRSTKFTIYNNMFCAGFHEGGRDSCQGDSGGPHVTEVEGTSFLTGIISWGEECAMKGKYGIYTKVSRYVNWIKEKTKLT

SEQ ID NO: 148 - protein, 418 aa, Artificial
  Human Factor IX variant with N-linked glycan attachment consensus sequence inserted
  misc_feature (45)..(45): Xaa can be any amino acid except Pro
  misc_feature (46)..(46): Xaa can be Ser or Thr
YNSGKLEEFVQGNLERECMEEKCSFEEAREVFENTERTTEFWKNXXQYVDGDQCESNPCLNGGSCKDDINSYECWCPFGFEGKNCELDVTCNIKNGRCEQFCKNSADNKVVCSCTEGYRLAENQKSCEPAVPFPCGRVSVSQTSKLTRAETVFPDVDYVNSTEAETILDNITQSTQSFNDFTRVVGGEDAKPGQFPWQVVLNGKVDAFCGGSIVNEKWIVTAAHCVETGVKITVVAGEHNIEETEHTEQKRNVIRIIPHHNYNAAINKYNHDIALLELDEPLVLNSYVTPICIADKEYTNIFLKFGSGYVSGWGRVFHKGRSALVLQYLRVPLVDRATCLRSTKFTIYNNMFCAGFHEGGRDSCQGDSGGPHVTEVEGTSFLTGIISWGEECAMKGKYGIYTKVSRYVNWIKEKTKLT

SEQ ID NO: 149 - protein, 418 aa, Artificial
  Human Factor IX variant with N-linked glycan attachment consensus sequence inserted
  misc_feature (46)..(46): Xaa can be any amino acid except Pro
  misc_feature (47)..(47): Xaa can be Ser or Thr
YNSGKLEEFVQGNLERECMEEKCSFEEAREVFENTERTTEFWKQNXXYVDGDQCESNPCLNGGSCKDDINSYECWCPFGFEGKNCELDVTCNIKNGRCEQFCKNSADNKVVCSCTEGYRLAENQKSCEPAVPFPCGRVSVSQTSKLTRAETVFPDVDYVNSTEAETILDNITQSTQSFNDFTRVVGGEDAKPGQFPWQVVLNGKVDAFCGGSIVNEKWIVTAAHCVETGVKITVVAGEHNIEETEHTEQKRNVIRIIPHHNYNAAINKYNHDIALLELDEPLVLNSYVTPICIADKEYTNIFLKFGSGYVSGWGRVFHKGRSALVLQYLRVPLVDRATCLRSTKFTIYNNMFCAGFHEGGRDSCQGDSGGPHVTEVEGTSFLTGIISWGEECAMKGKYGIYTKVSRYVNWIKEKTKLT

SEQ ID NO: 150 - protein, 418 aa, Artificial
  Human Factor IX variant with N-linked glycan attachment consensus sequence inserted
  misc_feature (47)..(47): Xaa can be any amino acid except Pro
  misc_feature (48)..(48): Xaa can be Ser or Thr
YNSGKLEEFVQGNLERECMEEKCSFEEAREVFENTERTTEFWKQYNXXVDGDQCESNPCLNGGSCKDDINSYECWCPFGFEGKNCELDVTCNIKNGRCEQFCKNSADNKVVCSCTEGYRLAENQKSCEPAVPFPCGRVSVSQTSKLTRAETVFPDVDYVNSTEAETILDNITQSTQSFNDFTRVVGGEDAKPGQFPWQVVLNGKVDAFCGGSIVNEKWIVTAAHCVETGVKITVVAGEHNIEETEHTEQKRNVIRIIPHHNYNAAINKYNHDIALLELDEPLVLNSYVTPICIADKEYTNIFLKFGSGYVSGWGRVFHKGRSALVLQYLRVPLVDRATCLRSTKFTIYNNMFCAGFHEGGRDSCQGDSGGPHVTEVEGTSFLTGIISWGEECAMKGKYGIYTKVSRYVNWIKEKTKLT

SEQ ID NO: 151 - protein, 418 aa, Artificial
  Human Factor IX variant with N-linked glycan attachment consensus sequence inserted
  misc_feature (48)..(48): Xaa can be any amino acid except Pro
  misc_feature (49)..(49): Xaa can be Ser or Thr
YNSGKLEEFVQGNLERECMEEKCSFEEAREVFENTERTTEFWKQYVNXXDGDQCESNPCLNGGSCKDDINSYECWCPFGFEGKNCELDVTCNIKNGRCEQFCKNSADNKVVCSCTEGYRLAENQKSCEPAVPFPCGRVSVSQTSKLTRAETVFPDVDYVNSTEAETILDNITQSTQSFNDFTRVVGGEDAKPGQFPWQVVLNGKVDAFCGGSIVNEKWIVTAAHCVETGVKITVVAGEHNIEETEHTEQKRNVIRIIPHHNYNAAINKYNHDIALLELDEPLVLNSYVTPICIADKEYTNIFLKFGSGYVSGWGRVFHKGRSALVLQYLRVPLVDRATCLRSTKFTIYNNMFCAGFHEGGRDSCQGDSGGPHVTEVEGTSFLTGIISWGEECAMKGKYGIYTKVSRYVNWIKEKTKLT

SEQ ID NO: 152 - protein, 418 aa, Artificial
  Human Factor IX variant with N-linked glycan attachment consensus sequence inserted
  misc_feature (49)..(49): Xaa can be any amino acid except Pro
  misc_feature (50)..(50): Xaa can be Ser or Thr
YNSGKLEEFVQGNLERECMEEKCSFEEAREVFENTERTTEFWKQYVDNXXGDQCESNPCLNGGSCKDDINSYECWCPFGFEGKNCELDVTCNIKNGRCEQFCKNSADNKVVCSCTEGYRLAENQKSCEPAVPFPCGRVSVSQTSKLTRAETVFPDVDYVNSTEAETILDNITQSTQSFNDFTRVVGGEDAKPGQFPWQVVLNGKVDAFCGGSIVNEKWIVTAAHCVETGVKITVVAGEHNIEETEHTEQKRNVIRIIPHHNYNAAINKYNHDIALLELDEPLVLNSYVTPICIADKEYTNIFLKFGSGYVSGWGRVFHKGRSALVLQYLRVPLVDRATCLRSTKFTIYNNMFCAGFHEGGRDSCQGDSGGPHVTEVEGTSFLTGIISWGEECAMKGKYGIYTKVSRYVNWIKEKTKLT

SEQ ID NO: 153 - protein, 418 aa, Artificial
  Human Factor IX variant with N-linked glycan attachment consensus sequence inserted
  misc_feature (53)..(53): Xaa can be any amino acid except Pro
  misc_feature (54)..(54): Xaa can be Ser or Thr
YNSGKLEEFVQGNLERECMEEKCSFEEAREVFENTERTTEFWKQYVDGDQCNXXESNPCLNGGSCKDDINSYECWCPFGFEGKNCELDVTCNIKNGRCEQFCKNSADNKVVCSCTEGYRLAENQKSCEPAVPFPCGRVSVSQTSKLTRAETVFPDVDYVNSTEAETILDNITQSTQSFNDFTRVVGGEDAKPGQFPWQVVLNGKVDAFCGGSIVNEKWIVTAAHCVETGVKITVVAGEHNIEETEHTEQKRNVIRIIPHHNYNAAINKYNHDIALLELDEPLVLNSYVTPICIADKEYTNIFLKFGSGYVSGWGRVFHKGRSALVLQYLRVPLVDRATCLRSTKFTIYNNMFCAGFHEGGRDSCQGDSGGPHVTEVEGTSFLTGIISWGEECAMKGKYGIYTKVSRYVNWIKEKTKLT

SEQ ID NO: 154 - protein, 418 aa, Artificial
  Human Factor IX variant with N-linked glycan attachment consensus sequence inserted
  misc_feature (54)..(54): Xaa can be any amino acid except Pro
  misc_feature (55)..(55): Xaa can be Ser or Thr
YNSGKLEEFVQGNLERECMEEKCSFEEAREVFENTERTTEFWKQYVDGDQCENXXSNPCLNGGSCKDDINSYECWCPFGFEGKNCELDVTCNIKNGRCEQFCKNSADNKVVCSCTEGYRLAENQKSCEPAVPFPCGRVSVSQTSKLTRAETVFPDVDYVNSTEAETILDNITQSTQSFNDFTRVVGGEDAKPGQFPWQVVLNGKVDAFCGGSIVNEKWIVTAAHCVETGVKITVVAGEHNIEETEHTEQKRNVIRIIPHHNYNAAINKYNHDIALLELDEPLVLNSYVTPICIADKEYTNIFLKFGSGYVSGWGRVFHKGRSALVLQYLRVPLVDRATCLRSTKFTIYNNMFCAGFHEGGRDSCQGDSGGPHVTEVEGTSFLTGIISWGEECAMKGKYGIYTKVSRYVNWIKEKTKLT

SEQ ID NO: 155 - protein, 418 aa, Artificial
  Human Factor IX variant with N-linked glycan attachment consensus sequence inserted
  misc_feature (55)..(55): Xaa can be any amino acid except Pro
  misc_feature (56)..(56): Xaa can be Ser or Thr
YNSGKLEEFVQGNLERECMEEKCSFEEAREVFENTERTTEFWKQYVDGDQCESNXXNPCLNGGSCKDDINSYECWCPFGFEGKNCELDVTCNIKNGRCEQFCKNSADNKVVCSCTEGYRLAENQKSCEPAVPFPCGRVSVSQTSKLTRAETVFPDVDYVNSTEAETILDNITQSTQSFNDFTRVVGGEDAKPGQFPWQVVLNGKVDAFCGGSIVNEKWIVTAAHCVETGVKITVVAGEHNIEETEHTEQKRNVIRIIPHHNYNAAINKYNHDIALLELDEPLVLNSYVTPICIADKEYTNIFLKFGSGYVSGWGRVFHKGRSALVLQYLRVPLVDRATCLRSTKFTIYNNMFCAGFHEGGRDSCQGDSGGPHVTEVEGTSFLTGIISWGEECAMKGKYGIYTKVSRYVNWIKEKTKLT

SEQ ID NO: 156 - protein, 418 aa, Artificial
  Human Factor IX variant with N-linked glycan attachment consensus sequence inserted
  msic_feature (56)..(56): Xaa can be any amino acid except Pro
  msic_feature (57)..(57): Xaa can be Ser or Thr
YNSGKLEEFVQGNLERECMEEKCSFEEAREVFENTERTTEFWKQYVDGDQCESNNXXPCLNGGSCKDDINSYECWCPFGFEGKNCELDVTCNIKNGRCEQFCKNSADNKVVCSCTEGYRLAENQKSCEPAVPFPCGRVSVSQTSKLTRAETVFPDVDYVNSTEAETILDNITQSTQSFNDFTRVVGGEDAKPGQFPWQVVLNGKVDAFCGGSIVNEKWIVTAAHCVETGVKITVVAGEHNIEETEHTEQKRNVIRIIPHHNYNAAINKYNHDIALLELDEPLVLNSYVTPICIADKEYTNIFLKFGSGYVSGWGRVFHKGRSALVLQYLRVPLVDRATCLRSTKFTIYNNMFCAGFHEGGRDSCQGDSGGPHVTEVEGTSFLTGIISWGEECAMKGKYGIYTKVSRYVNWIKEKTKLT

SEQ ID NO: 157 - protein, 418 aa, Artificial
  Human Factor IX variant with N-linked glycan attachment consensus sequence inserted
  misc_feature (84)..(84): Xaa can be any amino acid except Pro
  misc_feature (85)..(85): Xaa can be Ser or Thr
YNSGKLEEFVQGNLERECMEEKCSFEEAREVFENTERTTEFWKQYVDGDQCESNPCLNGGSCKDDINSYECWCPFGFEGKNCNXXELDVTCNIKNGRCEQFCKNSADNKVVCSCTEGYRLAENQKSCEPAVPFPCGRVSVSQTSKLTRAETVFPDVDYVNSTEAETILDNITQSTQSFNDFTRVVGGEDAKPGQFPWQVVLNGKVDAFCGGSIVNEKWIVTAAHCVETGVKITVVAGEHNIEETEHTEQKRNVIRIIPHHNYNAAINKYNHDIALLELDEPLVLNSYVTPICIADKEYTNIFLKFGSGYVSGWGRVFHKGRSALVLQYLRVPLVDRATCLRSTKFTIYNNMFCAGFHEGGRDSCQGDSGGPHVTEVEGTSFLTGIISWGEECAMKGKYGIYTKVSRYVNWIKEKTKLT

SEQ ID NO: 158 - protein, 418 aa, Artificial
  Human Factor IX variant with N-linked glycan attachment consensus sequence inserted
  misc_feature (85)..(85): Xaa can be any amino acid except Pro
  misc_feature (86)..(86): Xaa can be Ser or Thr
YNSGKLEEFVQGNLERECMEEKCSFEEAREVFENTERTTEFWKQYVDGDQCESNPCLNGGSCKDDINSYECWCPFGFEGKNCENXXLDVTCNIKNGRCEQFCKNSADNKVVCSCTEGYRLAENQKSCEPAVPFPCGRVSVSQTSKLTRAETVFPDVDYVNSTEAETILDNITQSTQSFNDFTRVVGGEDAKPGQFPWQVVLNGKVDAFCGGSIVNEKWIVTAAHCVETGVKITVVAGEHNIEETEHTEQKRNVIRIIPHHNYNAAINKYNHDIALLELDEPLVLNSYVTPICIADKEYTNIFLKFGSGYVSGWGRVFHKGRSALVLQYLRVPLVDRATCLRSTKFTIYNNMFCAGFHEGGRDSCQGDSGGPHVTEVEGTSFLTGIISWGEECAMKGKYGIYTKVSRYVNWIKEKTKLT

SEQ ID NO: 159 - protein, 418 aa, Artificial
  Human Factor IX variant with N-linked glycan attachment consensus sequence inserted
  misc_feature (86)..(86): Xaa can be any amino acid except Pro
  misc_feature (87)..(87): Xaa can be Ser or Thr
YNSGKLEEFVQGNLERECMEEKCSFEEAREVFENTERTTEFWKQYVDGDQCESNPCLNGGSCKDDINSYECWCPFGFEGKNCELNXXDVTCNIKNGRCEQFCKNSADNKVVCSCTEGYRLAENQKSCEPAVPFPCGRVSVSQTSKLTRAETVFPDVDYVNSTEAETILDNITQSTQSFNDFTRVVGGEDAKPGQFPWQVVLNGKVDAFCGGSIVNEKWIVTAAHCVETGVKITVVAGEHNIEETEHTEQKRNVIRIIPHHNYNAAINKYNHDIALLELDEPLVLNSYVTPICIADKEYTNIFLKFGSGYVSGWGRVFHKGRSALVLQYLRVPLVDRATCLRSTKFTIYNNMFCAGFHEGGRDSCQGDSGGPHVTEVEGTSFLTGIISWGEECAMKGKYGIYTKVSRYVNWIKEKTKLT

SEQ ID NO: 160 - protein, 418 aa, Artificial
  Human Factor IX variant with N-linked glycan attachment consensus sequence inserted
  misc_feature (87)..(87): Xaa can be any amino acid except Pro
  misc_feature (88)..(88): Xaa can be Ser or Thr
YNSGKLEEFVQGNLERECMEEKCSFEEAREVFENTERTTEFWKQYVDGDQCESNPCLNGGSCKDDINSYECWCPFGFEGKNCELDNXXVTCNIKNGRCEQFCKNSADNKVVCSCTEGYRLAENQKSCEPAVPFPCGRVSVSQTSKLTRAETVFPDVDYVNSTEAETILDNITQSTQSFNDFTRVVGGEDAKPGQFPWQVVLNGKVDAFCGGSIVNEKWIVTAAHCVETGVKITVVAGEHNIEETEHTEQKRNVIRIIPHHNYNAAINKYNHDIALLELDEPLVLNSYVTPICIADKEYTNIFLKFGSGYVSGWGRVFHKGRSALVLQYLRVPLVDRATCLRSTKFTIYNNMFCAGFHEGGRDSCQGDSGGPHVTEVEGTSFLTGIISWGEECAMKGKYGIYTKVSRYVNWIKEKTKLT

SEQ ID NO: 161 - protein, 418 aa, Artificial
  Human Factor IX variant with N-linked glycan attachment consensus sequence inserted
  misc_feature (90)..(90): Xaa can be any amino acid except Pro
  misc_feature (91)..(91): Xaa can be Ser or Thr
YNSGKLEEFVQGNLERECMEEKCSFEEAREVFENTERTTEFWKQYVDGDQCESNPCLNGGSCKDDINSYECWCPFGFEGKNCELDVTCNXXNIKNGRCEQFCKNSADNKVVCSCTEGYRLAENQKSCEPAVPFPCGRVSVSQTSKLTRAETVFPDVDYVNSTEAETILDNITQSTQSFNDFTRVVGGEDAKPGQFPWQVVLNGKVDAFCGGSIVNEKWIVTAAHCVETGVKITVVAGEHNIEETEHTEQKRNVIRIIPHHNYNAAINKYNHDIALLELDEPLVLNSYVTPICIADKEYTNIFLKFGSGYVSGWGRVFHKGRSALVLQYLRVPLVDRATCLRSTKFTIYNNMFCAGFHEGGRDSCQGDSGGPHVTEVEGTSFLTGIISWGEECAMKGKYGIYTKVSRYVNWIKEKTKLT

SEQ ID NO: 162 - protein, 418 aa, Artificial
  Human Factor IX variant with N-linked glycan attachment consensus sequence inserted
  misc_feature (91)..(91): Xaa can be any amino acid except Pro
  misc_feature (92)..(92): Xaa can be any naturally occurring amino acid
YNSGKLEEFVQGNLERECMEEKCSFEEAREVFENTERTTEFWKQYVDGDQCESNPCLNGGSCKDDINSYECWCPFGFEGKNCELDVTCNNXXIKNGRCEQFCKNSADNKVVCSCTEGYRLAENQKSCEPAVPFPCGRVSVSQTSKLTRAETVFPDVDYVNSTEAETILDNITQSTQSFNDFTRVVGGEDAKPGQFPWQVVLNGKVDAFCGGSIVNEKWIVTAAHCVETGVKITVVAGEHNIEETEHTEQKRNVIRIIPHHNYNAAINKYNHDIALLELDEPLVLNSYVTPICIADKEYTNIFLKFGSGYVSGWGRVFHKGRSALVLQYLRVPLVDRATCLRSTKFTIYNNMFCAGFHEGGRDSCQGDSGGPHVTEVEGTSFLTGIISWGEECAMKGKYGIYTKVSRYVNWIKEKTKLT

SEQ ID NO: 163 - protein, 418 aa, Artificial
  Human Factor IX variant with N-linked glycan attachment consensus sequence inserted
  misc_feature (92)..(92): Xaa can be any amino acid except Pro
  misc_feature (93)..(93): Xaa can be Ser or Thr
YNSGKLEEFVQGNLERECMEEKCSFEEAREVFENTERTTEFWKQYVDGDQCESNPCLNGGSCKDDINSYECWCPFGFEGKNCELDVTCNINXXKNGRCEQFCKNSADNKVVCSCTEGYRLAENQKSCEPAVPFPCGRVSVSQTSKLTRAETVFPDVDYVNSTEAETILDNITQSTQSFNDFTRVVGGEDAKPGQFPWQVVLNGKVDAFCGGSIVNEKWIVTAAHCVETGVKITVVAGEHNIEETEHTEQKRNVIRIIPHHNYNAAINKYNHDIALLELDEPLVLNSYVTPICIADKEYTNIFLKFGSGYVSGWGRVFHKGRSALVLQYLRVPLVDRATCLRSTKFTIYNNMFCAGFHEGGRDSCQGDSGGPHVTEVEGTSFLTGIISWGEECAMKGKYGIYTKVSRYVNWIKEKTKLT

SEQ ID NO: 164 - protein, 418 aa, Artificial
  Human Factor IX variant with N-linked glycan attachment consensus sequence inserted
  misc_feature (93)..(93): Xaa can be any amino acid except Pro
  misc_feature (94)..(94): Xaa can be Ser or Thr
YNSGKLEEFVQGNLERECMEEKCSFEEAREVFENTERTTEFWKQYVDGDQCESNPCLNGGSCKDDINSYECWCPFGFEGKNCELDVTCNIKNXXNGRCEQFCKNSADNKVVCSCTEGYRLAENQKSCEPAVPFPCGRVSVSQTSKLTRAETVFPDVDYVNSTEAETILDNITQSTQSFNDFTRVVGGEDAKPGQFPWQVVLNGKVDAFCGGSIVNEKWIVTAAHCVETGVKITVVAGEHNIEETEHTEQKRNVIRIIPHHNYNAAINKYNHDIALLELDEPLVLNSYVTPICIADKEYTNIFLKFGSGYVSGWGRVFHKGRSALVLQYLRVPLVDRATCLRSTKFTIYNNMFCAGFHEGGRDSCQGDSGGPHVTEVEGTSFLTGIISWGEECAMKGKYGIYTKVSRYVNWIKEKTKLT

SEQ ID NO: 165 - protein, 418 aa, Artificial
  Human Factor IX variant with N-linked glycan attachment consensus sequence inserted
  misc_feature (104)..(104): Xaa can be any amino acid except Pro
  misc_feature (105)..(105): Xaa can be Ser or Thr
YNSGKLEEFVQGNLERECMEEKCSFEEAREVFENTERTTEFWKQYVDGDQCESNPCLNGGSCKDDINSYECWCPFGFEGKNCELDVTCNIKNGRCEQFCKNSNXXADNKVVCSCTEGYRLAENQKSCEPAVPFPCGRVSVSQTSKLTRAETVFPDVDYVNSTEAETILDNITQSTQSFNDFTRVVGGEDAKPGQFPWQVVLNGKVDAFCGGSIVNEKWIVTAAHCVETGVKITVVAGEHNIEETEHTEQKRNVIRIIPHHNYNAAINKYNHDIALLELDEPLVLNSYVTPICIADKEYTNIFLKFGSGYVSGWGRVFHKGRSALVLQYLRVPLVDRATCLRSTKFTIYNNMFCAGFHEGGRDSCQGDSGGPHVTEVEGTSFLTGIISWGEECAMKGKYGIYTKVSRYVNWIKEKTKLT

SEQ ID NO: 166 - protein, 418 aa, Artificial
  Human Factor IX variant with N-linked glycan attachment consensus sequence inserted
  misc_feature (105)..(105): Xaa can be any amino acid except Pro
  misc_feature (106)..(106): Xaa can be Ser or Thr
YNSGKLEEFVQGNLERECMEEKCSFEEAREVFENTERTTEFWKQYVDGDQCESNPCLNGGSCKDDINSYECWCPFGFEGKNCELDVTCNIKNGRCEQFCKNSANXXDNKVVCSCTEGYRLAENQKSCEPAVPFPCGRVSVSQTSKLTRAETVFPDVDYVNSTEAETILDNITQSTQSFNDFTRVVGGEDAKPGQFPWQVVLNGKVDAFCGGSIVNEKWIVTAAHCVETGVKITVVAGEHNIEETEHTEQKRNVIRIIPHHNYNAAINKYNHDIALLELDEPLVLNSYVTPICIADKEYTNIFLKFGSGYVSGWGRVFHKGRSALVLQYLRVPLVDRATCLRSTKFTIYNNMFCAGFHEGGRDSCQGDSGGPHVTEVEGTSFLTGIISWGEECAMKGKYGIYTKVSRYVNWIKEKTKLT

SEQ ID NO: 167 - protein, 418 aa, Artificial
  Human Factor IX variant with N-linked glycan attachment consensus sequence inserted
  misc_feature (106)..(106): Xaa can be any amino acid except Pro
  misc_feature (107)..(107): Xaa can be Ser or Thr
YNSGKLEEFVQGNLERECMEEKCSFEEAREVFENTERTTEFWKQYVDGDQCESNPCLNGGSCKDDINSYECWCPFGFEGKNCELDVTCNIKNGRCEQFCKNSADNXXNKVVCSCTEGYRLAENQKSCEPAVPFPCGRVSVSQTSKLTRAETVFPDVDYVNSTEAETILDNITQSTQSFNDFTRVVGGEDAKPGQFPWQVVLNGKVDAFCGGSIVNEKWIVTAAHCVETGVKITVVAGEHNIEETEHTEQKRNVIRIIPHHNYNAAINKYNHDIALLELDEPLVLNSYVTPICIADKEYTNIFLKFGSGYVSGWGRVFHKGRSALVLQYLRVPLVDRATCLRSTKFTIYNNMFCAGFHEGGRDSCQGDSGGPHVTEVEGTSFLTGIISWGEECAMKGKYGIYTKVSRYVNWIKEKTKLT

SEQ ID NO: 168 - protein, 418 aa, Artificial
  Human Factor IX variant with N-linked glycan attachment consensus sequence inserted
  misc_feature (107)..(107): Xaa can be any amino acid except Pro
  misc_feature (108)..(108): Xaa can be Ser or Thr
YNSGKLEEFVQGNLERECMEEKCSFEEAREVFENTERTTEFWKQYVDGDQCESNPCLNGGSCKDDINSYECWCPFGFEGKNCELDVTCNIKNGRCEQFCKNSADNNXXKVVCSCTEGYRLAENQKSCEPAVPFPCGRVSVSQTSKLTRAETVFPDVDYVNSTEAETILDNITQSTQSFNDFTRVVGGEDAKPGQFPWQVVLNGKVDAFCGGSIVNEKWIVTAAHCVETGVKITVVAGEHNIEETEHTEQKRNVIRIIPHHNYNAAINKYNHDIALLELDEPLVLNSYVTPICIADKEYTNIFLKFGSGYVSGWGRVFHKGRSALVLQYLRVPLVDRATCLRSTKFTIYNNMFCAGFHEGGRDSCQGDSGGPHVTEVEGTSFLTGIISWGEECAMKGKYGIYTKVSRYVNWIKEKTKLT

SEQ ID NO: 169 - protein, 418 aa, Artificial
  Human Factor IX variant with N-linked glycan attachment consensus sequence inserted
  misc_feature (108)..(108): Xaa can be any amino acid except Pro
  misc_feature (109)..(109): Xaa can be Ser or Thr
YNSGKLEEFVQGNLERECMEEKCSFEEAREVFENTERTTEFWKQYVDGDQCESNPCLNGGSCKDDINSYECWCPFGFEGKNCELDVTCNIKNGRCEQFCKNSADNKNXXVVCSCTEGYRLAENQKSCEPAVPFPCGRVSVSQTSKLTRAETVFPDVDYVNSTEAETILDNITQSTQSFNDFTRVVGGEDAKPGQFPWQVVLNGKVDAFCGGSIVNEKWIVTAAHCVETGVKITVVAGEHNIEETEHTEQKRNVIRIIPHHNYNAAINKYNHDIALLELDEPLVLNSYVTPICIADKEYTNIFLKFGSGYVSGWGRVFHKGRSALVLQYLRVPLVDRATCLRSTKFTIYNNMFCAGFHEGGRDSCQGDSGGPHVTEVEGTSFLTGIISWGEECAMKGKYGIYTKVSRYVNWIKEKTKLT

SEQ ID NO: 170 - protein, 418 aa, Artificial
  Human Factor IX variant with N-linked glycan attachment consensus sequence inserted
  misc_feature (120)..(120): Xaa can be any amino acid except Pro
  misc_feature (121)..(121): Xaa can be Ser or Thr
YNSGKLEEFVQGNLERECMEEKCSFEEAREVFENTERTTEFWKQYVDGDQCESNPCLNGGSCKDDINSYECWCPFGFEGKNCELDVTCNIKNGRCEQFCKNSADNKVVCSCTEGYRLANXXENQKSCEPAVPFPCGRVSVSQTSKLTRAETVFPDVDYVNSTEAETILDNITQSTQSFNDFTRVVGGEDAKPGQFPWQVVLNGKVDAFCGGSIVNEKWIVTAAHCVETGVKITVVAGEHNIEETEHTEQKRNVIRIIPHHNYNAAINKYNHDIALLELDEPLVLNSYVTPICIADKEYTNIFLKFGSGYVSGWGRVFHKGRSALVLQYLRVPLVDRATCLRSTKFTIYNNMFCAGFHEGGRDSCQGDSGGPHVTEVEGTSFLTGIISWGEECAMKGKYGIYTKVSRYVNWIKEKTKLT

SEQ ID NO: 171 - protein, 418 aa, Artificial
  Human Factor IX variant with N-linked glycan attachment consensus sequence inserted
  misc_feature (121)..(121): Xaa can be any amino acid except Pro
  misc_feature (122)..(122): Xaa can be Ser or Thr
YNSGKLEEFVQGNLERECMEEKCSFEEAREVFENTERTTEFWKQYVDGDQCESNPCLNGGSCKDDINSYECWCPFGFEGKNCELDVTCNIKNGRCEQFCKNSADNKVVCSCTEGYRLAENXXNQKSCEPAVPFPCGRVSVSQTSKLTRAETVFPDVDYVNSTEAETILDNITQSTQSFNDFTRVVGGEDAKPGQFPWQVVLNGKVDAFCGGSIVNEKWIVTAAHCVETGVKITVVAGEHNIEETEHTEQKRNVIRIIPHHNYNAAINKYNHDIALLELDEPLVLNSYVTPICIADKEYTNIFLKFGSGYVSGWGRVFHKGRSALVLQYLRVPLVDRATCLRSTKFTIYNNMFCAGFHEGGRDSCQGDSGGPHVTEVEGTSFLTGIISWGEECAMKGKYGIYTKVSRYVNWIKEKTKLT

SEQ ID NO: 172 - protein, 418 aa, Artificial
  Human Factor IX variant with N-linked glycan attachment consensus sequence inserted
  misc_feature (122)..(122): Xaa can be any amino acid except Pro
  misc_feature (123)..(123): Xaa can be Ser or Thr
YNSGKLEEFVQGNLERECMEEKCSFEEAREVFENTERTTEFWKQYVDGDQCESNPCLNGGSCKDDINSYECWCPFGFEGKNCELDVTCNIKNGRCEQFCKNSADNKVVCSCTEGYRLAENNXXQKSCEPAVPFPCGRVSVSQTSKLTRAETVFPDVDYVNSTEAETILDNITQSTQSFNDFTRVVGGEDAKPGQFPWQVVLNGKVDAFCGGSIVNEKWIVTAAHCVETGVKITVVAGEHNIEETEHTEQKRNVIRIIPHHNYNAAINKYNHDIALLELDEPLVLNSYVTPICIADKEYTNIFLKFGSGYVSGWGRVFHKGRSALVLQYLRVPLVDRATCLRSTKFTIYNNMFCAGFHEGGRDSCQGDSGGPHVTEVEGTSFLTGIISWGEECAMKGKYGIYTKVSRYVNWIKEKTKLT

SEQ ID NO: 173 - protein, 418 aa, Artificial
  Human Factor IX variant with N-linked glycan attachment consensus sequence inserted
  misc_feature (123)..(123): Xaa can be any amino acid except Pro
  misc_feature (124)..(124): Xaa can be Ser or Thr
YNSGKLEEFVQGNLERECMEEKCSFEEAREVFENTERTTEFWKQYVDGDQCESNPCLNGGSCKDDINSYECWCPFGFEGKNCELDVTCNIKNGRCEQFCKNSADNKVVCSCTEGYRLAENQNXXKSCEPAVPFPCGRVSVSQTSKLTRAETVFPDVDYVNSTEAETILDNITQSTQSFNDFTRVVGGEDAKPGQFPWQVVLNGKVDAFCGGSIVNEKWIVTAAHCVETGVKITVVAGEHNIEETEHTEQKRNVIRIIPHHNYNAAINKYNHDIALLELDEPLVLNSYVTPICIADKEYTNIFLKFGSGYVSGWGRVFHKGRSALVLQYLRVPLVDRATCLRSTKFTIYNNMFCAGFHEGGRDSCQGDSGGPHVTEVEGTSFLTGIISWGEECAMKGKYGIYTKVSRYVNWIKEKTKLT

SEQ ID NO: 174 - protein, 418 aa, Artificial
  Human Factor IX variant with N-linked glycan attachment consensus sequence inserted
  misc_feature (124)..(124): Xaa can be any amino acid except Pro
  misc_feature (125)..(125): Xaa can be Ser or Thr
YNSGKLEEFVQGNLERECMEEKCSFEEAREVFENTERTTEFWKQYVDGDQCESNPCLNGGSCKDDINSYECWCPFGFEGKNCELDVTCNIKNGRCEQFCKNSADNKVVCSCTEGYRLAENQKNXXSCEPAVPFPCGRVSVSQTSKLTRAETVFPDVDYVNSTEAETILDNITQSTQSFNDFTRVVGGEDAKPGQFPWQVVLNGKVDAFCGGSIVNEKWIVTAAHCVETGVKITVVAGEHNIEETEHTEQKRNVIRIIPHHNYNAAINKYNHDIALLELDEPLVLNSYVTPICIADKEYTNIFLKFGSGYVSGWGRVFHKGRSALVLQYLRVPLVDRATCLRSTKFTIYNNMFCAGFHEGGRDSCQGDSGGPHVTEVEGTSFLTGIISWGEECAMKGKYGIYTKVSRYVNWIKEKTKLT

SEQ ID NO: 175 - protein, 418 aa, Artificial
  Human Factor IX variant with N-linked glycan attachment consensus sequence inserted
  misc_feature (129)..(129): Xaa can be any amino acid except Pro
  misc_feature (130)..(130): Xaa can be Ser or Thr
YNSGKLEEFVQGNLERECMEEKCSFEEAREVFENTERTTEFWKQYVDGDQCESNPCLNGGSCKDDINSYECWCPFGFEGKNCELDVTCNIKNGRCEQFCKNSADNKVVCSCTEGYRLAENQKSCEPANXXVPFPCGRVSVSQTSKLTRAETVFPDVDYVNSTEAETILDNITQSTQSFNDFTRVVGGEDAKPGQFPWQVVLNGKVDAFCGGSIVNEKWIVTAAHCVETGVKITVVAGEHNIEETEHTEQKRNVIRIIPHHNYNAAINKYNHDIALLELDEPLVLNSYVTPICIADKEYTNIFLKFGSGYVSGWGRVFHKGRSALVLQYLRVPLVDRATCLRSTKFTIYNNMFCAGFHEGGRDSCQGDSGGPHVTEVEGTSFLTGIISWGEECAMKGKYGIYTKVSRYVNWIKEKTKLT

SEQ ID NO: 176 - protein, 418 aa, Artificial
  Human Factor IX variant with N-linked glycan attachment consensus sequence inserted
  misc_feature (130)..(130): Xaa can be any amino acid except Pro
  misc_feature (131)..(131): Xaa can be Ser or Thr
YNSGKLEEFVQGNLERECMEEKCSFEEAREVFENTERTTEFWKQYVDGDQCESNPCLNGGSCKDDINSYECWCPFGFEGKNCELDVTCNIKNGRCEQFCKNSADNKVVCSCTEGYRLAENQKSCEPAVNXXPFPCGRVSVSQTSKLTRAETVFPDVDYVNSTEAETILDNITQSTQSFNDFTRVVGGEDAKPGQFPWQVVLNGKVDAFCGGSIVNEKWIVTAAHCVETGVKITVVAGEHNIEETEHTEQKRNVIRIIPHHNYNAAINKYNHDIALLELDEPLVLNSYVTPICIADKEYTNIFLKFGSGYVSGWGRVFHKGRSALVLQYLRVPLVDRATCLRSTKFTIYNNMFCAGFHEGGRDSCQGDSGGPHVTEVEGTSFLTGIISWGEECAMKGKYGIYTKVSRYVNWIKEKTKLT

SEQ ID NO: 177 - protein, 418 aa, Artificial
  Human Factor IX variant with N-linked glycan attachment consensus sequence inserted
  misc_feature (131)..(131): Xaa can be any amino acid except Pro
  misc_feature (132)..(132): Xaa can be Ser or Thr
YNSGKLEEFVQGNLERECMEEKCSFEEAREVFENTERTTEFWKQYVDGDQCESNPCLNGGSCKDDINSYECWCPFGFEGKNCELDVTCNIKNGRCEQFCKNSADNKVVCSCTEGYRLAENQKSCEPAVPNXXFPCGRVSVSQTSKLTRAETVFPDVDYVNSTEAETILDNITQSTQSFNDFTRVVGGEDAKPGQFPWQVVLNGKVDAFCGGSIVNEKWIVTAAHCVETGVKITVVAGEHNIEETEHTEQKRNVIRIIPHHNYNAAINKYNHDIALLELDEPLVLNSYVTPICIADKEYTNIFLKFGSGYVSGWGRVFHKGRSALVLQYLRVPLVDRATCLRSTKFTIYNNMFCAGFHEGGRDSCQGDSGGPHVTEVEGTSFLTGIISWGEECAMKGKYGIYTKVSRYVNWIKEKTKLT

SEQ ID NO: 178 - protein, 418 aa, Artificial
  Human Factor IX variant with N-linked glycan attachment consensus sequence inserted
  misc_feature (132)..(132): Xaa can be any amino acid except Pro
  misc_feature (133)..(133): Xaa can be Ser or Thr
YNSGKLEEFVQGNLERECMEEKCSFEEAREVFENTERTTEFWKQYVDGDQCESNPCLNGGSCKDDINSYECWCPFGFEGKNCELDVTCNIKNGRCEQFCKNSADNKVVCSCTEGYRLAENQKSCEPAVPFNXXPCGRVSVSQTSKLTRAETVFPDVDYVNSTEAETILDNITQSTQSFNDFTRVVGGEDAKPGQFPWQVVLNGKVDAFCGGSIVNEKWIVTAAHCVETGVKITVVAGEHNIEETEHTEQKRNVIRIIPHHNYNAAINKYNHDIALLELDEPLVLNSYVTPICIADKEYTNIFLKFGSGYVSGWGRVFHKGRSALVLQYLRVPLVDRATCLRSTKFTIYNNMFCAGFHEGGRDSCQGDSGGPHVTEVEGTSFLTGIISWGEECAMKGKYGIYTKVSRYVNWIKEKTKLT

SEQ ID NO: 179 - protein, 418 aa, Artificial
  Human Factor IX variant with N-linked glycan attachment consensus sequence inserted
  misc_feature (147)..(147): Xaa can be any amino acid except Pro
  misc_feature (148)..(148): Xaa can be Ser or Thr
YNSGKLEEFVQGNLERECMEEKCSFEEAREVFENTERTTEFWKQYVDGDQCESNPCLNGGSCKDDINSYECWCPFGFEGKNCELDVTCNIKNGRCEQFCKNSADNKVVCSCTEGYRLAENQKSCEPAVPFPCGRVSVSQTSKLTRNXXAETVFPDVDYVNSTEAETILDNITQSTQSFNDFTRVVGGEDAKPGQFPWQVVLNGKVDAFCGGSIVNEKWIVTAAHCVETGVKITVVAGEHNIEETEHTEQKRNVIRIIPHHNYNAAINKYNHDIALLELDEPLVLNSYVTPICIADKEYTNIFLKFGSGYVSGWGRVFHKGRSALVLQYLRVPLVDRATCLRSTKFTIYNNMFCAGFHEGGRDSCQGDSGGPHVTEVEGTSFLTGIISWGEECAMKGKYGIYTKVSRYVNWIKEKTKLT

SEQ ID NO: 180 - protein, 418 aa, Artificial
  Human Factor IX variant with N-linked glycan attachment consensus sequence inserted
  misc_feature (202)..(202): Xaa can be any amino acid except Pro
  misc_feature (203)..(203): Xaa can be Ser or Thr
YNSGKLEEFVQGNLERECMEEKCSFEEAREVFENTERTTEFWKQYVDGDQCESNPCLNGGSCKDDINSYECWCPFGFEGKNCELDVTCNIKNGRCEQFCKNSADNKVVCSCTEGYRLAENQKSCEPAVPFPCGRVSVSQTSKLTRAETVFPDVDYVNSTEAETILDNITQSTQSFNDFTRVVGGEDAKPGQFPWQVVLNGNXXKVDAFCGGSIVNEKWIVTAAHCVETGVKITVVAGEHNIEETEHTEQKRNVIRIIPHHNYNAAINKYNHDIALLELDEPLVLNSYVTPICIADKEYTNIFLKFGSGYVSGWGRVFHKGRSALVLQYLRVPLVDRATCLRSTKFTIYNNMFCAGFHEGGRDSCQGDSGGPHVTEVEGTSFLTGIISWGEECAMKGKYGIYTKVSRYVNWIKEKTKLT

SEQ ID NO: 181 - protein, 418 aa, Artificial
  Human Factor IX variant with N-linked glycan attachment consensus sequence inserted
  misc_feature (203)..(203): Xaa can be any amino acid except Pro
  misc_feature (204)..(204): Xaa can be Ser or Thr
YNSGKLEEFVQGNLERECMEEKCSFEEAREVFENTERTTEFWKQYVDGDQCESNPCLNGGSCKDDINSYECWCPFGFEGKNCELDVTCNIKNGRCEQFCKNSADNKVVCSCTEGYRLAENQKSCEPAVPFPCGRVSVSQTSKLTRAETVFPDVDYVNSTEAETILDNITQSTQSFNDFTRVVGGEDAKPGQFPWQVVLNGKNXXVDAFCGGSIVNEKWIVTAAHCVETGVKITVVAGEHNIEETEHTEQKRNVIRIIPHHNYNAAINKYNHDIALLELDEPLVLNSYVTPICIADKEYTNIFLKFGSGYVSGWGRVFHKGRSALVLQYLRVPLVDRATCLRSTKFTIYNNMFCAGFHEGGRDSCQGDSGGPHVTEVEGTSFLTGIISWGEECAMKGKYGIYTKVSRYVNWIKEKTKLT

SEQ ID NO: 182 - protein, 418 aa, Artificial
  Human Factor IX variant with N-linked glycan attachment consensus sequence inserted
  misc_feature (204)..(204): Xaa can be any amino acid except Pro
  misc_feature (205)..(205): Xaa can be Ser or Thr
YNSGKLEEFVQGNLERECMEEKCSFEEAREVFENTERTTEFWKQYVDGDQCESNPCLNGGSCKDDINSYECWCPFGFEGKNCELDVTCNIKNGRCEQFCKNSADNKVVCSCTEGYRLAENQKSCEPAVPFPCGRVSVSQTSKLTRAETVFPDVDYVNSTEAETILDNITQSTQSFNDFTRVVGGEDAKPGQFPWQVVLNGKVNXXDAFCGGSIVNEKWIVTAAHCVETGVKITVVAGEHNIEETEHTEQKRNVIRIIPHHNYNAAINKYNHDIALLELDEPLVLNSYVTPICIADKEYTNIFLKFGSGYVSGWGRVFHKGRSALVLQYLRVPLVDRATCLRSTKFTIYNNMFCAGFHEGGRDSCQGDSGGPHVTEVEGTSFLTGIISWGEECAMKGKYGIYTKVSRYVNWIKEKTKLT

SEQ ID NO: 183 - protein, 418 aa, Artificial
  Human Factor IX variant with N-linked glycan attachment consensus sequence inserted
  misc_feature (205)..(205): Xaa can be any amino acid except Pro
  misc_feature (206)..(206): Xaa can be Ser or Thr
YNSGKLEEFVQGNLERECMEEKCSFEEAREVFENTERTTEFWKQYVDGDQCESNPCLNGGSCKDDINSYECWCPFGFEGKNCELDVTCNIKNGRCEQFCKNSADNKVVCSCTEGYRLAENQKSCEPAVPFPCGRVSVSQTSKLTRAETVFPDVDYVNSTEAETILDNITQSTQSFNDFTRVVGGEDAKPGQFPWQVVLNGKVDNXXAFCGGSIVNEKWIVTAAHCVETGVKITVVAGEHNIEETEHTEQKRNVIRIIPHHNYNAAINKYNHDIALLELDEPLVLNSYVTPICIADKEYTNIFLKFGSGYVSGWGRVFHKGRSALVLQYLRVPLVDRATCLRSTKFTIYNNMFCAGFHEGGRDSCQGDSGGPHVTEVEGTSFLTGIISWGEECAMKGKYGIYTKVSRYVNWIKEKTKLT

SEQ ID NO: 184 - protein, 418 aa, Artificial
  Human Factor IX variant with N-linked glycan attachment consensus sequence inserted
  misc_feature (239)..(239): Xaa can be any amino acid except Pro
  misc_feature (240)..(240): Xaa can be Ser or Thr
YNSGKLEEFVQGNLERECMEEKCSFEEAREVFENTERTTEFWKQYVDGDQCESNPCLNGGSCKDDINSYECWCPFGFEGKNCELDVTCNIKNGRCEQFCKNSADNKVVCSCTEGYRLAENQKSCEPAVPFPCGRVSVSQTSKLTRAETVFPDVDYVNSTEAETILDNITQSTQSFNDFTRVVGGEDAKPGQFPWQVVLNGKVDAFCGGSIVNEKWIVTAAHCVETGVKITVVAGEHNNXXIEETEHTEQKRNVIRIIPHHNYNAAINKYNHDIALLELDEPLVLNSYVTPICIADKEYTNIFLKFGSGYVSGWGRVFHKGRSALVLQYLRVPLVDRATCLRSTKFTIYNNMFCAGFHEGGRDSCQGDSGGPHVTEVEGTSFLTGIISWGEECAMKGKYGIYTKVSRYVNWIKEKTKLT

SEQ ID NO: 185 - protein, 418 aa, Artificial
  Human Factor IX variant with N-linked glycan attachment consensus sequence inserted
  misc_feature (240)..(240): Xaa can be any amino acid except Pro
  misc_feature (241)..(241): Xaa can be Ser or Thr
YNSGKLEEFVQGNLERECMEEKCSFEEAREVFENTERTTEFWKQYVDGDQCESNPCLNGGSCKDDINSYECWCPFGFEGKNCELDVTCNIKNGRCEQFCKNSADNKVVCSCTEGYRLAENQKSCEPAVPFPCGRVSVSQTSKLTRAETVFPDVDYVNSTEAETILDNITQSTQSFNDFTRVVGGEDAKPGQFPWQVVLNGKVDAFCGGSIVNEKWIVTAAHCVETGVKITVVAGEHNINXXEETEHTEQKRNVIRIIPHHNYNAAINKYNHDIALLELDEPLVLNSYVTPICIADKEYTNIFLKFGSGYVSGWGRVFHKGRSALVLQYLRVPLVDRATCLRSTKFTIYNNMFCAGFHEGGRDSCQGDSGGPHVTEVEGTSFLTGIISWGEECAMKGKYGIYTKVSRYVNWIKEKTKLT

SEQ ID NO: 186 - protein, 418 aa, Artificial
  Human Factor IX variant with N-linked glycan attachment consensus sequence inserted
  misc_feature (241)..(241): Xaa can be any amino acid except Pro
  misc_feature (242)..(242): Xaa can be Ser or Thr
YNSGKLEEFVQGNLERECMEEKCSFEEAREVFENTERTTEFWKQYVDGDQCESNPCLNGGSCKDDINSYECWCPFGFEGKNCELDVTCNIKNGRCEQFCKNSADNKVVCSCTEGYRLAENQKSCEPAVPFPCGRVSVSQTSKLTRAETVFPDVDYVNSTEAETILDNITQSTQSFNDFTRVVGGEDAKPGQFPWQVVLNGKVDAFCGGSIVNEKWIVTAAHCVETGVKITVVAGEHNIENXXETEHTEQKRNVIRIIPHHNYNAAINKYNHDIALLELDEPLVLNSYVTPICIADKEYTNIFLKFGSGYVSGWGRVFHKGRSALVLQYLRVPLVDRATCLRSTKFTIYNNMFCAGFHEGGRDSCQGDSGGPHVTEVEGTSFLTGIISWGEECAMKGKYGIYTKVSRYVNWIKEKTKLT

SEQ ID NO: 187 - protein, 418 aa, Artificial
  Human Factor IX variant with N-linked glycan attachment consensus sequence inserted
  misc_feature (242)..(242): Xaa can be any amino acid except Pro
  misc_feature (243)..(243): Xaa can be Ser or Thr
YNSGKLEEFVQGNLERECMEEKCSFEEAREVFENTERTTEFWKQYVDGDQCESNPCLNGGSCKDDINSYECWCPFGFEGKNCELDVTCNIKNGRCEQFCKNSADNKVVCSCTEGYRLAENQKSCEPAVPFPCGRVSVSQTSKLTRAETVFPDVDYVNSTEAETILDNITQSTQSFNDFTRVVGGEDAKPGQFPWQVVLNGKVDAFCGGSIVNEKWIVTAAHCVETGVKITVVAGEHNIEENXXTEHTEQKRNVIRIIPHHNYNAAINKYNHDIALLELDEPLVLNSYVTPICIADKEYTNIFLKFGSGYVSGWGRVFHKGRSALVLQYLRVPLVDRATCLRSTKFTIYNNMFCAGFHEGGRDSCQGDSGGPHVTEVEGTSFLTGIISWGEECAMKGKYGIYTKVSRYVNWIKEKTKLT

SEQ ID NO: 188 - protein, 418 aa, Artificial
  Human Factor IX variant with N-linked glycan attachment consensus sequence inserted
  misc_feature (277)..(277): Xaa can be any amino acid except Pro
  misc_feature (278)..(278): Xaa can be Ser or Thr
YNSGKLEEFVQGNLERECMEEKCSFEEAREVFENTERTTEFWKQYVDGDQCESNPCLNGGSCKDDINSYECWCPFGFEGKNCELDVTCNIKNGRCEQFCKNSADNKVVCSCTEGYRLAENQKSCEPAVPFPCGRVSVSQTSKLTRAETVFPDVDYVNSTEAETILDNITQSTQSFNDFTRVVGGEDAKPGQFPWQVVLNGKVDAFCGGSIVNEKWIVTAAHCVETGVKITVVAGEHNIEETEHTEQKRNVIRIIPHHNYNAAINKYNHDIALLELNXXDEPLVLNSYVTPICIADKEYTNIFLKFGSGYVSGWGRVFHKGRSALVLQYLRVPLVDRATCLRSTKFTIYNNMFCAGFHEGGRDSCQGDSGGPHVTEVEGTSFLTGIISWGEECAMKGKYGIYTKVSRYVNWIKEKTKLT

SEQ ID NO: 189 - protein, 418 aa, Artificial
  Human Factor IX variant with N-linked glycan attachment consensus sequence inserted
  misc_feature (278)..(278): Xaa can be any amino acid except Pro
  misc_feature (279)..(279): Xaa can be Ser or Thr
YNSGKLEEFVQGNLERECMEEKCSFEEAREVFENTERTTEFWKQYVDGDQCESNPCLNGGSCKDDINSYECWCPFGFEGKNCELDVTCNIKNGRCEQFCKNSADNKVVCSCTEGYRLAENQKSCEPAVPFPCGRVSVSQTSKLTRAETVFPDVDYVNSTEAETILDNITQSTQSFNDFTRVVGGEDAKPGQFPWQVVLNGKVDAFCGGSIVNEKWIVTAAHCVETGVKITVVAGEHNIEETEHTEQKRNVIRIIPHHNYNAAINKYNHDIALLELDNXXEPLVLNSYVTPICIADKEYTNIFLKFGSGYVSGWGRVFHKGRSALVLQYLRVPLVDRATCLRSTKFTIYNNMFCAGFHEGGRDSCQGDSGGPHVTEVEGTSFLTGIISWGEECAMKGKYGIYTKVSRYVNWIKEKTKLT

SEQ ID NO: 190 - protein, 418 aa, Artificial
  Human Factor IX variant with N-linked glycan attachment consensus sequence inserted
  misc_feature (279)..(279): Xaa can be any amino acid except Pro
  misc_feature (280)..(280): Xaa can be Ser or Thr
YNSGKLEEFVQGNLERECMEEKCSFEEAREVFENTERTTEFWKQYVDGDQCESNPCLNGGSCKDDINSYECWCPFGFEGKNCELDVTCNIKNGRCEQFCKNSADNKVVCSCTEGYRLAENQKSCEPAVPFPCGRVSVSQTSKLTRAETVFPDVDYVNSTEAETILDNITQSTQSFNDFTRVVGGEDAKPGQFPWQVVLNGKVDAFCGGSIVNEKWIVTAAHCVETGVKITVVAGEHNIEETEHTEQKRNVIRIIPHHNYNAAINKYNHDIALLELDENXXPLVLNSYVTPICIADKEYTNIFLKFGSGYVSGWGRVFHKGRSALVLQYLRVPLVDRATCLRSTKFTIYNNMFCAGFHEGGRDSCQGDSGGPHVTEVEGTSFLTGIISWGEECAMKGKYGIYTKVSRYVNWIKEKTKLT

SEQ ID NO: 191 - protein, 418 aa, Artificial
  Human Factor IX variant with N-linked glycan attachment consensus sequence inserted
  misc_feature (280)..(280): Xaa can be any amino acid except Pro
  misc_feature (281)..(281): Xaa can be Ser or Thr
YNSGKLEEFVQGNLERECMEEKCSFEEAREVFENTERTTEFWKQYVDGDQCESNPCLNGGSCKDDINSYECWCPFGFEGKNCELDVTCNIKNGRCEQFCKNSADNKVVCSCTEGYRLAENQKSCEPAVPFPCGRVSVSQTSKLTRAETVFPDVDYVNSTEAETILDNITQSTQSFNDFTRVVGGEDAKPGQFPWQVVLNGKVDAFCGGSIVNEKWIVTAAHCVETGVKITVVAGEHNIEETEHTEQKRNVIRIIPHHNYNAAINKYNHDIALLELDEPNXXLVLNSYVTPICIADKEYTNIFLKFGSGYVSGWGRVFHKGRSALVLQYLRVPLVDRATCLRSTKFTIYNNMFCAGFHEGGRDSCQGDSGGPHVTEVEGTSFLTGIISWGEECAMKGKYGIYTKVSRYVNWIKEKTKLT

SEQ ID NO: 192 - protein, 418 aa, Artificial
  Human Factor IX variant with N-linked glycan attachment consensus sequence inserted
  misc_feature (292)..(292): Xaa can be any amino acid except Pro
  misc_feature (293)..(293): Xaa can be Ser or Thr
YNSGKLEEFVQGNLERECMEEKCSFEEAREVFENTERTTEFWKQYVDGDQCESNPCLNGGSCKDDINSYECWCPFGFEGKNCELDVTCNIKNGRCEQFCKNSADNKVVCSCTEGYRLAENQKSCEPAVPFPCGRVSVSQTSKLTRAETVFPDVDYVNSTEAETILDNITQSTQSFNDFTRVVGGEDAKPGQFPWQVVLNGKVDAFCGGSIVNEKWIVTAAHCVETGVKITVVAGEHNIEETEHTEQKRNVIRIIPHHNYNAAINKYNHDIALLELDEPLVLNSYVTPICINXXADKEYTNIFLKFGSGYVSGWGRVFHKGRSALVLQYLRVPLVDRATCLRSTKFTIYNNMFCAGFHEGGRDSCQGDSGGPHVTEVEGTSFLTGIISWGEECAMKGKYGIYTKVSRYVNWIKEKTKLT

SEQ ID NO: 193 - protein, 418 aa, Artificial
  Human Factor IX variant with N-linked glycan attachment consensus sequence inserted
  misc_feature (294)..(294): Xaa can be any amino acid except Pro
  misc_feature (295)..(295): Xaa can be Ser or Thr
YNSGKLEEFVQGNLERECMEEKCSFEEAREVFENTERTTEFWKQYVDGDQCESNPCLNGGSCKDDINSYECWCPFGFEGKNCELDVTCNIKNGRCEQFCKNSADNKVVCSCTEGYRLAENQKSCEPAVPFPCGRVSVSQTSKLTRAETVFPDVDYVNSTEAETILDNITQSTQSFNDFTRVVGGEDAKPGQFPWQVVLNGKVDAFCGGSIVNEKWIVTAAHCVETGVKITVVAGEHNIEETEHTEQKRNVIRIIPHHNYNAAINKYNHDIALLELDEPLVLNSYVTPICIADNXXKEYTNIFLKFGSGYVSGWGRVFHKGRSALVLQYLRVPLVDRATCLRSTKFTIYNNMFCAGFHEGGRDSCQGDSGGPHVTEVEGTSFLTGIISWGEECAMKGKYGIYTKVSRYVNWIKEKTKLT

SEQ ID NO: 194 - protein, 418 aa, Artificial
  Human Factor IX variant with N-linked glycan attachment consensus sequence inserted
  misc_feature (295)..(295): Xaa can be any amino acid except Pro
  misc_feature (296)..(296): Xaa can be Ser or Thr
YNSGKLEEFVQGNLERECMEEKCSFEEAREVFENTERTTEFWKQYVDGDQCESNPCLNGGSCKDDINSYECWCPFGFEGKNCELDVTCNIKNGRCEQFCKNSADNKVVCSCTEGYRLAENQKSCEPAVPFPCGRVSVSQTSKLTRAETVFPDVDYVNSTEAETILDNITQSTQSFNDFTRVVGGEDAKPGQFPWQVVLNGKVDAFCGGSIVNEKWIVTAAHCVETGVKITVVAGEHNIEETEHTEQKRNVIRIIPHHNYNAAINKYNHDIALLELDEPLVLNSYVTPICIADKNXXEYTNIFLKFGSGYVSGWGRVFHKGRSALVLQYLRVPLVDRATCLRSTKFTIYNNMFCAGFHEGGRDSCQGDSGGPHVTEVEGTSFLTGIISWGEECAMKGKYGIYTKVSRYVNWIKEKTKLT

SEQ ID NO: 195 - protein, 418 aa, Artificial
  Human Factor IX variant with N-linked glycan attachment consensus sequence inserted
  misc_feature (296)..(296): Xaa can be any amino acid except Pro
  misc_feature (297)..(297): Xaa can be Ser or Thr
YNSGKLEEFVQGNLERECMEEKCSFEEAREVFENTERTTEFWKQYVDGDQCESNPCLNGGSCKDDINSYECWCPFGFEGKNCELDVTCNIKNGRCEQFCKNSADNKVVCSCTEGYRLAENQKSCEPAVPFPCGRVSVSQTSKLTRAETVFPDVDYVNSTEAETILDNITQSTQSFNDFTRVVGGEDAKPGQFPWQVVLNGKVDAFCGGSIVNEKWIVTAAHCVETGVKITVVAGEHNIEETEHTEQKRNVIRIIPHHNYNAAINKYNHDIALLELDEPLVLNSYVTPICIADKENXXYTNIFLKFGSGYVSGWGRVFHKGRSALVLQYLRVPLVDRATCLRSTKFTIYNNMFCAGFHEGGRDSCQGDSGGPHVTEVEGTSFLTGIISWGEECAMKGKYGIYTKVSRYVNWIKEKTKLT

SEQ ID NO: 196 - protein, 418 aa, Artificial
  Human Factor IX variant with N-linked glycan attachment consensus sequence inserted
  misc_feature (312)..(312): Xaa can be any amino acid except Pro
  misc_feature (313)..(313): Xaa can be Ser or Thr
YNSGKLEEFVQGNLERECMEEKCSFEEAREVFENTERTTEFWKQYVDGDQCESNPCLNGGSCKDDINSYECWCPFGFEGKNCELDVTCNIKNGRCEQFCKNSADNKVVCSCTEGYRLAENQKSCEPAVPFPCGRVSVSQTSKLTRAETVFPDVDYVNSTEAETILDNITQSTQSFNDFTRVVGGEDAKPGQFPWQVVLNGKVDAFCGGSIVNEKWIVTAAHCVETGVKITVVAGEHNIEETEHTEQKRNVIRIIPHHNYNAAINKYNHDIALLELDEPLVLNSYVTPICIADKEYTNIFLKFGSGYVSGWNXXGRVFHKGRSALVLQYLRVPLVDRATCLRSTKFTIYNNMFCAGFHEGGRDSCQGDSGGPHVTEVEGTSFLTGIISWGEECAMKGKYGIYTKVSRYVNWIKEKTKLT

SEQ ID NO: 197 - protein, 418 aa, Artificial
  Human Factor IX variant with N-linked glycan attachment consensus sequence inserted
  misc_feature (314)..(314): Xaa can be any amino acid except Pro
  misc_feature (315)..(315): Xaa can be Ser or Thr
YNSGKLEEFVQGNLERECMEEKCSFEEAREVFENTERTTEFWKQYVDGDQCESNPCLNGGSCKDDINSYECWCPFGFEGKNCELDVTCNIKNGRCEQFCKNSADNKVVCSCTEGYRLAENQKSCEPAVPFPCGRVSVSQTSKLTRAETVFPDVDYVNSTEAETILDNITQSTQSFNDFTRVVGGEDAKPGQFPWQVVLNGKVDAFCGGSIVNEKWIVTAAHCVETGVKITVVAGEHNIEETEHTEQKRNVIRIIPHHNYNAAINKYNHDIALLELDEPLVLNSYVTPICIADKEYTNIFLKFGSGYVSGWGRNXXVFHKGRSALVLQYLRVPLVDRATCLRSTKFTIYNNMFCAGFHEGGRDSCQGDSGGPHVTEVEGTSFLTGIISWGEECAMKGKYGIYTKVSRYVNWIKEKTKLT

SEQ ID NO: 198 - protein, 418 aa, Artificial
  Human Factor IX variant with N-linked glycan attachment consensus sequence inserted
  misc_feature (315)..(315): Xaa can be any amino acid except Pro
  misc_feature (316)..(316): Xaa can be Ser or Thr
YNSGKLEEFVQGNLERECMEEKCSFEEAREVFENTERTTEFWKQYVDGDQCESNPCLNGGSCKDDINSYECWCPFGFEGKNCELDVTCNIKNGRCEQFCKNSADNKVVCSCTEGYRLAENQKSCEPAVPFPCGRVSVSQTSKLTRAETVFPDVDYVNSTEAETILDNITQSTQSFNDFTRVVGGEDAKPGQFPWQVVLNGKVDAFCGGSIVNEKWIVTAAHCVETGVKITVVAGEHNIEETEHTEQKRNVIRIIPHHNYNAAINKYNHDIALLELDEPLVLNSYVTPICIADKEYTNIFLKFGSGYVSGWGRVNXXFHKGRSALVLQYLRVPLVDRATCLRSTKFTIYNNMFCAGFHEGGRDSCQGDSGGPHVTEVEGTSFLTGIISWGEECAMKGKYGIYTKVSRYVNWIKEKTKLT

SEQ ID NO: 199 - protein, 418 aa, Artificial
  Human Factor IX variant with N-linked glycan attachment consensus sequence inserted
  misc_feature (316)..(316): Xaa can be any amino acid except Pro
  misc_feature (317)..(317): Xaa can be Ser or Thr
YNSGKLEEFVQGNLERECMEEKCSFEEAREVFENTERTTEFWKQYVDGDQCESNPCLNGGSCKDDINSYECWCPFGFEGKNCELDVTCNIKNGRCEQFCKNSADNKVVCSCTEGYRLAENQKSCEPAVPFPCGRVSVSQTSKLTRAETVFPDVDYVNSTEAETILDNITQSTQSFNDFTRVVGGEDAKPGQFPWQVVLNGKVDAFCGGSIVNEKWIVTAAHCVETGVKITVVAGEHNIEETEHTEQKRNVIRIIPHHNYNAAINKYNHDIALLELDEPLVLNSYVTPICIADKEYTNIFLKFGSGYVSGWGRVFNXXHKGRSALVLQYLRVPLVDRATCLRSTKFTIYNNMFCAGFHEGGRDSCQGDSGGPHVTEVEGTSFLTGIISWGEECAMKGKYGIYTKVSRYVNWIKEKTKLT

SEQ ID NO: 200 - protein, 418 aa, Artificial
  Human Factor IX variant with N-linked glycan attachment consensus sequence inserted
  misc_feature (317)..(317): Xaa can be any amino acid except Pro
  misc_feature (318)..(318): Xaa can be Ser or Thr
YNSGKLEEFVQGNLERECMEEKCSFEEAREVFENTERTTEFWKQYVDGDQCESNPCLNGGSCKDDINSYECWCPFGFEGKNCELDVTCNIKNGRCEQFCKNSADNKVVCSCTEGYRLAENQKSCEPAVPFPCGRVSVSQTSKLTRAETVFPDVDYVNSTEAETILDNITQSTQSFNDFTRVVGGEDAKPGQFPWQVVLNGKVDAFCGGSIVNEKWIVTAAHCVETGVKITVVAGEHNIEETEHTEQKRNVIRIIPHHNYNAAINKYNHDIALLELDEPLVLNSYVTPICIADKEYTNIFLKFGSGYVSGWGRVFHNXXKGRSALVLQYLRVPLVDRATCLRSTKFTIYNNMFCAGFHEGGRDSCQGDSGGPHVTEVEGTSFLTGIISWGEECAMKGKYGIYTKVSRYVNWIKEKTKLT

SEQ ID NO: 201 - protein, 418 aa, Artificial
  Human Factor IX variant with N-linked glycan attachment consensus sequence inserted
  misc_feature (318)..(318): Xaa can be any amino acid except Pro
  misc_feature (319)..(319): Xaa can be Ser or Thr
YNSGKLEEFVQGNLERECMEEKCSFEEAREVFENTERTTEFWKQYVDGDQCESNPCLNGGSCKDDINSYECWCPFGFEGKNCELDVTCNIKNGRCEQFCKNSADNKVVCSCTEGYRLAENQKSCEPAVPFPCGRVSVSQTSKLTRAETVFPDVDYVNSTEAETILDNITQSTQSFNDFTRVVGGEDAKPGQFPWQVVLNGKVDAFCGGSIVNEKWIVTAAHCVETGVKITVVAGEHNIEETEHTEQKRNVIRIIPHHNYNAAINKYNHDIALLELDEPLVLNSYVTPICIADKEYTNIFLKFGSGYVSGWGRVFHKNXXGRSALVLQYLRVPLVDRATCLRSTKFTIYNNMFCAGFHEGGRDSCQGDSGGPHVTEVEGTSFLTGIISWGEECAMKGKYGIYTKVSRYVNWIKEKTKLT

SEQ ID NO: 202 - protein, 418 aa, Artificial
  Human Factor IX variant with N-linked glycan attachment consensus sequence inserted
  misc_feature (388)..(388): Xaa can be any amino acid except Pro
  misc_feature (389)..(389): Xaa can be Ser or Thr
YNSGKLEEFVQGNLERECMEEKCSFEEAREVFENTERTTEFWKQYVDGDQCESNPCLNGGSCKDDINSYECWCPFGFEGKNCELDVTCNIKNGRCEQFCKNSADNKVVCSCTEGYRLAENQKSCEPAVPFPCGRVSVSQTSKLTRAETVFPDVDYVNSTEAETILDNITQSTQSFNDFTRVVGGEDAKPGQFPWQVVLNGKVDAFCGGSIVNEKWIVTAAHCVETGVKITVVAGEHNIEETEHTEQKRNVIRIIPHHNYNAAINKYNHDIALLELDEPLVLNSYVTPICIADKEYTNIFLKFGSGYVSGWGRVFHKGRSALVLQYLRVPLVDRATCLRSTKFTIYNNMFCAGFHEGGRDSCQGDSGGPHVTEVEGTSFLTGIISWGNXXEECAMKGKYGIYTKVSRYVNWIKEKTKLT

SEQ ID NO: 203 - protein, 418 aa, Artificial
  Human Factor IX variant with N-linked glycan attachment consensus sequence inserted
  misc_feature (389)..(389): Xaa can be any amino acid except Pro
  misc_feature (390)..(390): Xaa can be Ser or Thr
YNSGKLEEFVQGNLERECMEEKCSFEEAREVFENTERTTEFWKQYVDGDQCESNPCLNGGSCKDDINSYECWCPFGFEGKNCELDVTCNIKNGRCEQFCKNSADNKVVCSCTEGYRLAENQKSCEPAVPFPCGRVSVSQTSKLTRAETVFPDVDYVNSTEAETILDNITQSTQSFNDFTRVVGGEDAKPGQFPWQVVLNGKVDAFCGGSIVNEKWIVTAAHCVETGVKITVVAGEHNIEETEHTEQKRNVIRIIPHHNYNAAINKYNHDIALLELDEPLVLNSYVTPICIADKEYTNIFLKFGSGYVSGWGRVFHKGRSALVLQYLRVPLVDRATCLRSTKFTIYNNMFCAGFHEGGRDSCQGDSGGPHVTEVEGTSFLTGIISWGENXXECAMKGKYGIYTKVSRYVNWIKEKTKLT

SEQ ID NO: 204 - protein, 418 aa, Artificial
  Human Factor IX variant with N-linked glycan attachment consensus sequence inserted
  misc_feature (390)..(390): Xaa can be any amino acid except Pro
  misc_feature (391)..(391): Xaa can be Ser or Thr
YNSGKLEEFVQGNLERECMEEKCSFEEAREVFENTERTTEFWKQYVDGDQCESNPCLNGGSCKDDINSYECWCPFGFEGKNCELDVTCNIKNGRCEQFCKNSADNKVVCSCTEGYRLAENQKSCEPAVPFPCGRVSVSQTSKLTRAETVFPDVDYVNSTEAETILDNITQSTQSFNDFTRVVGGEDAKPGQFPWQVVLNGKVDAFCGGSIVNEKWIVTAAHCVETGVKITVVAGEHNIEETEHTEQKRNVIRIIPHHNYNAAINKYNHDIALLELDEPLVLNSYVTPICIADKEYTNIFLKFGSGYVSGWGRVFHKGRSALVLQYLRVPLVDRATCLRSTKFTIYNNMFCAGFHEGGRDSCQGDSGGPHVTEVEGTSFLTGIISWGEENXXCAMKGKYGIYTKVSRYVNWIKEKTKLT

SEQ ID NO: 205 - protein, 418 aa, Artificial
  Human Factor IX variant with N-linked glycan attachment consensus sequence inserted
  misc_feature (391)..(391): Xaa can be any amino acid except Pro
  misc_feature (392)..(392): Xaa can be Ser or Thr
YNSGKLEEFVQGNLERECMEEKCSFEEAREVFENTERTTEFWKQYVDGDQCESNPCLNGGSCKDDINSYECWCPFGFEGKNCELDVTCNIKNGRCEQFCKNSADNKVVCSCTEGYRLAENQKSCEPAVPFPCGRVSVSQTSKLTRAETVFPDVDYVNSTEAETILDNITQSTQSFNDFTRVVGGEDAKPGQFPWQVVLNGKVDAFCGGSIVNEKWIVTAAHCVETGVKITVVAGEHNIEETEHTEQKRNVIRIIPHHNYNAAINKYNHDIALLELDEPLVLNSYVTPICIADKEYTNIFLKFGSGYVSGWGRVFHKGRSALVLQYLRVPLVDRATCLRSTKFTIYNNMFCAGFHEGGRDSCQGDSGGPHVTEVEGTSFLTGIISWGEECNXXAMKGKYGIYTKVSRYVNWIKEKTKLT

SEQ ID NO: 206 - protein, 418 aa, Artificial
  Human Factor IX variant with N-linked glycan attachment consensus sequence inserted
  misc_feature (392)..(392): Xaa can be any amino acid except Pro
  misc_feature (393)..(393): Xaa can be Ser or Thr
YNSGKLEEFVQGNLERECMEEKCSFEEAREVFENTERTTEFWKQYVDGDQCESNPCLNGGSCKDDINSYECWCPFGFEGKNCELDVTCNIKNGRCEQFCKNSADNKVVCSCTEGYRLAENQKSCEPAVPFPCGRVSVSQTSKLTRAETVFPDVDYVNSTEAETILDNITQSTQSFNDFTRVVGGEDAKPGQFPWQVVLNGKVDAFCGGSIVNEKWIVTAAHCVETGVKITVVAGEHNIEETEHTEQKRNVIRIIPHHNYNAAINKYNHDIALLELDEPLVLNSYVTPICIADKEYTNIFLKFGSGYVSGWGRVFHKGRSALVLQYLRVPLVDRATCLRSTKFTIYNNMFCAGFHEGGRDSCQGDSGGPHVTEVEGTSFLTGIISWGEECANXXMKGKYGIYTKVSRYVNWIKEKTKLT

SEQ ID NO: 207 - protein, 418 aa, Artificial
  Human Factor IX variant with N-linked glycan attachment consensus sequence inserted
  misc_feature (393)..(393): Xaa can be any amino acid except Pro
  misc_feature (394)..(394): Xaa can be Ser or Thr
YNSGKLEEFVQGNLERECMEEKCSFEEAREVFENTERTTEFWKQYVDGDQCESNPCLNGGSCKDDINSYECWCPFGFEGKNCELDVTCNIKNGRCEQFCKNSADNKVVCSCTEGYRLAENQKSCEPAVPFPCGRVSVSQTSKLTRAETVFPDVDYVNSTEAETILDNITQSTQSFNDFTRVVGGEDAKPGQFPWQVVLNGKVDAFCGGSIVNEKWIVTAAHCVETGVKITVVAGEHNIEETEHTEQKRNVIRIIPHHNYNAAINKYNHDIALLELDEPLVLNSYVTPICIADKEYTNIFLKFGSGYVSGWGRVFHKGRSALVLQYLRVPLVDRATCLRSTKFTIYNNMFCAGFHEGGRDSCQGDSGGPHVTEVEGTSFLTGIISWGEECAMNXXKGKYGIYTKVSRYVNWIKEKTKLT

SEQ ID NO: 208 - protein, 418 aa, Artificial
  Human Factor IX variant with N-linked glycan attachment consensus sequence inserted
  misc_feature (394)..(394): Xaa can be any amino acid except Pro
  misc_feature (395)..(395): Xaa can be Ser or Thr
YNSGKLEEFVQGNLERECMEEKCSFEEAREVFENTERTTEFWKQYVDGDQCESNPCLNGGSCKDDINSYECWCPFGFEGKNCELDVTCNIKNGRCEQFCKNSADNKVVCSCTEGYRLAENQKSCEPAVPFPCGRVSVSQTSKLTRAETVFPDVDYVNSTEAETILDNITQSTQSFNDFTRVVGGEDAKPGQFPWQVVLNGKVDAFCGGSIVNEKWIVTAAHCVETGVKITVVAGEHNIEETEHTEQKRNVIRIIPHHNYNAAINKYNHDIALLELDEPLVLNSYVTPICIADKEYTNIFLKFGSGYVSGWGRVFHKGRSALVLQYLRVPLVDRATCLRSTKFTIYNNMFCAGFHEGGRDSCQGDSGGPHVTEVEGTSFLTGIISWGEECAMKNXXGKYGIYTKVSRYVNWIKEKTKLT

SEQ ID NO: 209 - protein, 418 aa, Artificial
  Human Factor IX variant with N-linked glycan attachment consensus sequence inserted
  misc_feature (395)..(395): Xaa can be any amino acid except Pro
  misc_feature (396)..(396): Xaa can be Ser or Thr
YNSGKLEEFVQGNLERECMEEKCSFEEAREVFENTERTTEFWKQYVDGDQCESNPCLNGGSCKDDINSYECWCPFGFEGKNCELDVTCNIKNGRCEQFCKNSADNKVVCSCTEGYRLAENQKSCEPAVPFPCGRVSVSQTSKLTRAETVFPDVDYVNSTEAETILDNITQSTQSFNDFTRVVGGEDAKPGQFPWQVVLNGKVDAFCGGSIVNEKWIVTAAHCVETGVKITVVAGEHNIEETEHTEQKRNVIRIIPHHNYNAAINKYNHDIALLELDEPLVLNSYVTPICIADKEYTNIFLKFGSGYVSGWGRVFHKGRSALVLQYLRVPLVDRATCLRSTKFTIYNNMFCAGFHEGGRDSCQGDSGGPHVTEVEGTSFLTGIISWGEECAMKGNXXKYGIYTKVSRYVNWIKEKTKLT

SEQ ID NO: 210 - protein, 418 aa, Artificial
  Human Factor IX variant with N-linked glycan attachment consensus sequence inserted
  misc_feature (396)..(396): Xaa can be any amino acid except Pro
  misc_feature (397)..(397): Xaa can be Ser or Thr
YNSGKLEEFVQGNLERECMEEKCSFEEAREVFENTERTTEFWKQYVDGDQCESNPCLNGGSCKDDINSYECWCPFGFEGKNCELDVTCNIKNGRCEQFCKNSADNKVVCSCTEGYRLAENQKSCEPAVPFPCGRVSVSQTSKLTRAETVFPDVDYVNSTEAETILDNITQSTQSFNDFTRVVGGEDAKPGQFPWQVVLNGKVDAFCGGSIVNEKWIVTAAHCVETGVKITVVAGEHNIEETEHTEQKRNVIRIIPHHNYNAAINKYNHDIALLELDEPLVLNSYVTPICIADKEYTNIFLKFGSGYVSGWGRVFHKGRSALVLQYLRVPLVDRATCLRSTKFTIYNNMFCAGFHEGGRDSCQGDSGGPHVTEVEGTSFLTGIISWGEECAMKGKNXXYGIYTKVSRYVNWIKEKTKLT

SEQ ID NO: 211 - protein, 418 aa, Artificial
  Human Factor IX variant with N-linked glycan attachment consensus sequence inserted
  misc_feature (410)..(410): Xaa can be any amino acid except Pro
  misc_feature (411)..(411): Xaa can be Ser or Thr
YNSGKLEEFVQGNLERECMEEKCSFEEAREVFENTERTTEFWKQYVDGDQCESNPCLNGGSCKDDINSYECWCPFGFEGKNCELDVTCNIKNGRCEQFCKNSADNKVVCSCTEGYRLAENQKSCEPAVPFPCGRVSVSQTSKLTRAETVFPDVDYVNSTEAETILDNITQSTQSFNDFTRVVGGEDAKPGQFPWQVVLNGKVDAFCGGSIVNEKWIVTAAHCVETGVKITVVAGEHNIEETEHTEQKRNVIRIIPHHNYNAAINKYNHDIALLELDEPLVLNSYVTPICIADKEYTNIFLKFGSGYVSGWGRVFHKGRSALVLQYLRVPLVDRATCLRSTKFTIYNNMFCAGFHEGGRDSCQGDSGGPHVTEVEGTSFLTGIISWGEECAMKGKYGIYTKVSRYVNWINXXKEKTKLT

SEQ ID NO: 212 - protein, 418 aa, Artificial
  Human Factor IX variant with N-linked glycan attachment consensus sequence inserted
  misc_feature (411)..(411): Xaa can be any amino acid except Pro
  misc_feature (412)..(412): Xaa can be Ser or Thr
YNSGKLEEFVQGNLERECMEEKCSFEEAREVFENTERTTEFWKQYVDGDQCESNPCLNGGSCKDDINSYECWCPFGFEGKNCELDVTCNIKNGRCEQFCKNSADNKVVCSCTEGYRLAENQKSCEPAVPFPCGRVSVSQTSKLTRAETVFPDVDYVNSTEAETILDNITQSTQSFNDFTRVVGGEDAKPGQFPWQVVLNGKVDAFCGGSIVNEKWIVTAAHCVETGVKITVVAGEHNIEETEHTEQKRNVIRIIPHHNYNAAINKYNHDIALLELDEPLVLNSYVTPICIADKEYTNIFLKFGSGYVSGWGRVFHKGRSALVLQYLRVPLVDRATCLRSTKFTIYNNMFCAGFHEGGRDSCQGDSGGPHVTEVEGTSFLTGIISWGEECAMKGKYGIYTKVSRYVNWIKNXXEKTKLT

SEQ ID NO: 213 - protein, 418 aa, Artificial
  Human Factor IX variant with N-linked glycan attachment consensus sequence inserted
  misc_feature (412)..(412): Xaa can be any amino acid except Pro
  misc_feature (413)..(413): Xaa can be Ser or Thr
YNSGKLEEFVQGNLERECMEEKCSFEEAREVFENTERTTEFWKQYVDGDQCESNPCLNGGSCKDDINSYECWCPFGFEGKNCELDVTCNIKNGRCEQFCKNSADNKVVCSCTEGYRLAENQKSCEPAVPFPCGRVSVSQTSKLTRAETVFPDVDYVNSTEAETILDNITQSTQSFNDFTRVVGGEDAKPGQFPWQVVLNGKVDAFCGGSIVNEKWIVTAAHCVETGVKITVVAGEHNIEETEHTEQKRNVIRIIPHHNYNAAINKYNHDIALLELDEPLVLNSYVTPICIADKEYTNIFLKFGSGYVSGWGRVFHKGRSALVLQYLRVPLVDRATCLRSTKFTIYNNMFCAGFHEGGRDSCQGDSGGPHVTEVEGTSFLTGIISWGEECAMKGKYGIYTKVSRYVNWIKENXXKTKLT

SEQ ID NO: 214 - protein, 418 aa, Artificial
  Human Factor IX variant with N-linked glycan attachment consensus sequence inserted
  misc_feature (413)..(413): Xaa can be any amino acid except Pro
  misc_feature (414)..(414): Xaa can be Ser or Thr
YNSGKLEEFVQGNLERECMEEKCSFEEAREVFENTERTTEFWKQYVDGDQCESNPCLNGGSCKDDINSYECWCPFGFEGKNCELDVTCNIKNGRCEQFCKNSADNKVVCSCTEGYRLAENQKSCEPAVPFPCGRVSVSQTSKLTRAETVFPDVDYVNSTEAETILDNITQSTQSFNDFTRVVGGEDAKPGQFPWQVVLNGKVDAFCGGSIVNEKWIVTAAHCVETGVKITVVAGEHNIEETEHTEQKRNVIRIIPHHNYNAAINKYNHDIALLELDEPLVLNSYVTPICIADKEYTNIFLKFGSGYVSGWGRVFHKGRSALVLQYLRVPLVDRATCLRSTKFTIYNNMFCAGFHEGGRDSCQGDSGGPHVTEVEGTSFLTGIISWGEECAMKGKYGIYTKVSRYVNWIKEKNXXTKLT

SEQ ID NO: 215 - protein, 418 aa, Artificial
  Human Factor IX variant with N-linked glycan attachment consensus sequence inserted
  misc_feature (415)..(415): Xaa can be any amino acid except Pro
  misc_feature (416)..(416): Xaa can be Ser or Thr
YNSGKLEEFVQGNLERECMEEKCSFEEAREVFENTERTTEFWKQYVDGDQCESNPCLNGGSCKDDINSYECWCPFGFEGKNCELDVTCNIKNGRCEQFCKNSADNKVVCSCTEGYRLAENQKSCEPAVPFPCGRVSVSQTSKLTRAETVFPDVDYVNSTEAETILDNITQSTQSFNDFTRVVGGEDAKPGQFPWQVVLNGKVDAFCGGSIVNEKWIVTAAHCVETGVKITVVAGEHNIEETEHTEQKRNVIRIIPHHNYNAAINKYNHDIALLELDEPLVLNSYVTPICIADKEYTNIFLKFGSGYVSGWGRVFHKGRSALVLQYLRVPLVDRATCLRSTKFTIYNNMFCAGFHEGGRDSCQGDSGGPHVTEVEGTSFLTGIISWGEECAMKGKYGIYTKVSRYVNWIKEKTKNXXLT

SEQ ID NO: 216 - protein, 418 aa, Artificial
  Human Factor IX variant with N-linked glycan attachment consensus sequence inserted
  misc_feature (416)..(416): Xaa can be any amino acid except Pro
  misc_feature (417)..(417): Xaa can be Ser or Thr
YNSGKLEEFVQGNLERECMEEKCSFEEAREVFENTERTTEFWKQYVDGDQCESNPCLNGGSCKDDINSYECWCPFGFEGKNCELDVTCNIKNGRCEQFCKNSADNKVVCSCTEGYRLAENQKSCEPAVPFPCGRVSVSQTSKLTRAETVFPDVDYVNSTEAETILDNITQSTQSFNDFTRVVGGEDAKPGQFPWQVVLNGKVDAFCGGSIVNEKWIVTAAHCVETGVKITVVAGEHNIEETEHTEQKRNVIRIIPHHNYNAAINKYNHDIALLELDEPLVLNSYVTPICIADKEYTNIFLKFGSGYVSGWGRVFHKGRSALVLQYLRVPLVDRATCLRSTKFTIYNNMFCAGFHEGGRDSCQGDSGGPHVTEVEGTSFLTGIISWGEECAMKGKYGIYTKVSRYVNWIKEKTKLNXXT

SEQ ID NO: 217 - protein, 418 aa, Artificial
  Human Factor IX variant with N-linked glycan attachment consensus sequence inserted
  misc_feature (417)..(417): Xaa can be any amino acid except Pro
  misc_feature (418)..(418): Xaa can be Ser or Thr
YNSGKLEEFVQGNLERECMEEKCSFEEAREVFENTERTTEFWKQYVDGDQCESNPCLNGGSCKDDINSYECWCPFGFEGKNCELDVTCNIKNGRCEQFCKNSADNKVVCSCTEGYRLAENQKSCEPAVPFPCGRVSVSQTSKLTRAETVFPDVDYVNSTEAETILDNITQSTQSFNDFTRVVGGEDAKPGQFPWQVVLNGKVDAFCGGSIVNEKWIVTAAHCVETGVKITVVAGEHNIEETEHTEQKRNVIRIIPHHNYNAAINKYNHDIALLELDEPLVLNSYVTPICIADKEYTNIFLKFGSGYVSGWGRVFHKGRSALVLQYLRVPLVDRATCLRSTKFTIYNNMFCAGFHEGGRDSCQGDSGGPHVTEVEGTSFLTGIISWGEECAMKGKYGIYTKVSRYVNWIKEKTKLTNXX

SEQ ID NO: 218 - protein, 422 aa, Artificial
  Human Factor IX variant with N-linked glycan attachment consensus sequence inserted
  misc_feature (417)..(417): Xaa can be any amino acid except Pro
  misc_feature (418)..(418): Xaa can be Ser or Thr
YNSGKLEEFVQGNLERECMEEKCSFEEAREVFENTERTTEFWKQYVDGDQCESNPCLNGGSCKDDINSYECWCPFGFEGKNCELDVTCNIKNGRCEQFCKNSADNKVVCSCTEGYRLAENQKSCEPAVPFPCGRVSVSQTSKLTRAETVFPDVDYVNSTEAETILDNITQSTQSFNDFTRVVGGEDAKPGQFPWQVVLNGKVDAFCGGSIVNEKWIVTAAHCVETGVKITVVAGEHNIEETEHTEQKRNVIRIIPHHNYNAAINKYNHDIALLELDEPLVLNSYVTPICIADKEYTNIFLKFGSGYVSGWGRVFHKGRSALVLQYLRVPLVDRATCLRSTKFTIYNNMFCAGFHEGGRDSCQGDSGGPHVTEVEGTSFLTGIISWGEECAMKGKYGIYTKVSRYVNWIKEKTKLTNXXGAGA

SEQ ID NO: 219 - protein, 421 aa, Artificial
  Human Factor IX variant with more than one N-linked glycan attachment consensus sequence inserted
  misc_feature (16)..(16): Xaa can be any amino acid except Pro
  misc_feature (17)..(17): Xaa can be Ser or Thr
  misc_feature (34)..(34): Xaa can be any amino acid except Pro
  misc_feature (35)..(35): Xaa can be Ser or Thr
YNSGKLEEFVQGNLNXXERECMEEKCSFEEARNXXEVFENTERTTEFWKQYVDGDQCESNPCLNGGSCKDDINSYECWCPFGFEGKNCELDVTCNIKNGRCEQFCKNSADNKVVCSCTEGYRLAENQKSCEPAVPFPCGRVSVSQTSKLTRAETVFPDVDYVNSTEAETILDNITQSTQSFNDFTRVVGGEDAKPGQFPWQVVLNGKVDAFCGGSIVNEKWIVTAAHCVETGVKITVVAGEHNIEETEHTEQKRNVIRIIPHHNYNAAINKYNHDIALLELDEPLVLNSYVTPICIADKEYTNIFLKFGSGYVSGWGRVFHKGRSALVLQYLRVPLVDRATCLRSTKFTIYNNMFCAGFHEGGRDSCQGDSGGPHVTEVEGTSFLTGIISWGEECAMKGKYGIYTKVSRYVNWIKEKTKLT

SEQ ID NO: 220 - protein, 421 aa, Artificial
  Human Factor IX variant with more than one N-linked glycan attachment consensus sequence inserted
  misc_feature (17)..(17): Xaa can be any amino acid except Pro
  misc_feature (18)..(18): Xaa can be Ser or Thr
  misc_feature (38)..(38): Xaa can be any amino acid except Pro
  misc_feature (39)..(39): Xaa can be Ser or Thr
YNSGKLEEFVQGNLENXXRECMEEKCSFEEAREVFENXXNTERTTEFWKQYVDGDQCESNPCLNGGSCKDDINSYECWCPFGFEGKNCELDVTCNIKNGRCEQFCKNSADNKVVCSCTEGYRLAENQKSCEPAVPFPCGRVSVSQTSKLTRAETVFPDVDYVNSTEAETILDNITQSTQSFNDFTRVVGGEDAKPGQFPWQVVLNGKVDAFCGGSIVNEKWIVTAAHCVETGVKITVVAGEHNIEETEHTEQKRNVIRIIPHHNYNAAINKYNHDIALLELDEPLVLNSYVTPICIADKEYTNIFLKFGSGYVSGWGRVFHKGRSALVLQYLRVPLVDRATCLRSTKFTIYNNMFCAGFHEGGRDSCQGDSGGPHVTEVEGTSFLTGIISWGEECAMKGKYGIYTKVSRYVNWIKEKTKLT

SEQ ID NO: 221 - protein, 421 aa, Artificial
  Human Factor IX variant with more than one N-linked glycan attachment consensus sequence inserted
  misc_feature (45)..(45): Xaa can be any amino acid except Pro
  misc_feature (46)..(46): Xaa can be Ser or Thr
  misc_feature (52)..(52): Xaa can be any amino acid except Pro
  misc_feature (53)..(53): Xaa can be Ser or Thr
YNSGKLEEFVQGNLERECMEEKCSFEEAREVFENTERTTEFWKNXXQYVDNXXGDQCESNPCLNGGSCKDDINSYECWCPFGFEGKNCELDVTCNIKNGRCEQFCKNSADNKVVCSCTEGYRLAENQKSCEPAVPFPCGRVSVSQTSKLTRAETVFPDVDYVNSTEAETILDNITQSTQSFNDFTRVVGGEDAKPGQFPWQVVLNGKVDAFCGGSIVNEKWIVTAAHCVETGVKITVVAGEHNIEETEHTEQKRNVIRIIPHHNYNAAINKYNHDIALLELDEPLVLNSYVTPICIADKEYTNIFLKFGSGYVSGWGRVFHKGRSALVLQYLRVPLVDRATCLRSTKFTIYNNMFCAGFHEGGRDSCQGDSGGPHVTEVEGTSFLTGIISWGEECAMKGKYGIYTKVSRYVNWIKEKTKLT

SEQ ID NO: 222 - protein, 424 aa, Artificial
  Human Factor IX variant with more than one N-linked glycan attachment consensus sequence inserted
  misc_feature (38)..(38): Xaa can be any amino acid except Pro
  misc_feature (39)..(39): Xaa can be Ser or Thr
  misc_feature (51)..(51): Xaa can be any amino acid except Pro
  misc_feature (52)..(52): Xaa can be Ser or Thr
  misc_feature (98)..(98): Xaa can be any amino acid except Pro
  misc_feature (99)..(99): Xaa can be Ser or Thr
YNSGKLEEFVQGNLERECMEEKCSFEEAREVFENTENXXRTTEFWKQYVNXXDGDQCESNPCLNGGSCKDDINSYECWCPFGFEGKNCELDVTCNINXXKNGRCEQFCKNSADNKVVCSCTEGYRLAENQKSCEPAVPFPCGRVSVSQTSKLTRAETVFPDVDYVNSTEAETILDNITQSTQSFNDFTRVVGGEDAKPGQFPWQVVLNGKVDAFCGGSIVNEKWIVTAAHCVETGVKITVVAGEHNIEETEHTEQKRNVIRIIPHHNYNAAINKYNHDIALLELDEPLVLNSYVTPICIADKEYTNIFLKFGSGYVSGWGRVFHKGRSALVLQYLRVPLVDRATCLRSTKFTIYNNMFCAGFHEGGRDSCQGDSGGPHVTEVEGTSFLTGIISWGEECAMKGKYGIYTKVSRYVNWIKEKTKLT

SEQ ID NO: 223 - protein, 421 aa, Artificial
  Human Factor IX variant with more than one N-linked glycan attachment consensus sequence inserted
  misc_feature (45)..(45): Xaa can be any amino acid except Pro
  misc_feature (46)..(46): Xaa can be Ser or Thr
  misc_feature (58)..(58): Xaa can be any amino acid except Pro
  misc_feature (59)..(59): Xaa can be Ser or Thr
YNSGKLEEFVQGNLERECMEEKCSFEEAREVFENTERTTEFWKNXXQYVDGDQCESNXXNPCLNGGSCKDDINSYECWCPFGFEGKNCELDVTCNIKNGRCEQFCKNSADNKVVCSCTEGYRLAENQKSCEPAVPFPCGRVSVSQTSKLTRAETVFPDVDYVNSTEAETILDNITQSTQSFNDFTRVVGGEDAKPGQFPWQVVLNGKVDAFCGGSIVNEKWIVTAAHCVETGVKITVVAGEHNIEETEHTEQKRNVIRIIPHHNYNAAINKYNHDIALLELDEPLVLNSYVTPICIADKEYTNIFLKFGSGYVSGWGRVFHKGRSALVLQYLRVPLVDRATCLRSTKFTIYNNMFCAGFHEGGRDSCQGDSGGPHVTEVEGTSFLTGIISWGEECAMKGKYGIYTKVSRYVNWIKEKTKLT

SEQ ID NO: 224 - protein, 421 aa, Artificial
  Human Factor IX variant with more than one N-linked glycan attachment consensus sequence inserted
  misc_feature (48)..(48): Xaa can be any amino acid except Pro
  misc_feature (49)..(49): Xaa can be Ser or Thr
  misc_feature (88)..(88): Xaa can be any amino acid except Pro
  misc_feature (89)..(89): Xaa can be Ser or Thr
YNSGKLEEFVQGNLERECMEEKCSFEEAREVFENTERTTEFWKQYVNXXDGDQCESNPCLNGGSCKDDINSYECWCPFGFEGKNCENXXLDVTCNIKNGRCEQFCKNSADNKVVCSCTEGYRLAENQKSCEPAVPFPCGRVSVSQTSKLTRAETVFPDVDYVNSTEAETILDNITQSTQSFNDFTRVVGGEDAKPGQFPWQVVLNGKVDAFCGGSIVNEKWIVTAAHCVETGVKITVVAGEHNIEETEHTEQKRNVIRIIPHHNYNAAINKYNHDIALLELDEPLVLNSYVTPICIADKEYTNIFLKFGSGYVSGWGRVFHKGRSALVLQYLRVPLVDRATCLRSTKFTIYNNMFCAGFHEGGRDSCQGDSGGPHVTEVEGTSFLTGIISWGEECAMKGKYGIYTKVSRYVNWIKEKTKLT

SEQ ID NO: 225 - protein, 424 aa, Artificial
  Human Factor IX variant with more than one N-linked glycan attachment consensus sequence inserted
  misc_feature (45)..(45): Xaa can be any amino acid except Pro
  misc_feature (46)..(46): Xaa can be Ser or Thr
  misc_feature (88)..(88): Xaa can be any amino acid except Pro
  misc_feature (89)..(89): Xaa can be Ser or Thr
  misc_feature (113)..(113): Xaa can be any amino acid except Pro
  misc_feature (114)..(114): Xaa can be Ser or Thr
YNSGKLEEFVQGNLERECMEEKCSFEEAREVFENTERTTEFWKNXXQYVDGDQCESNPCLNGGSCKDDINSYECWCPFGFEGKNCENXXLDVTCNIKNGRCEQFCKNSADNNXXKVVCSCTEGYRLAENQKSCEPAVPFPCGRVSVSQTSKLTRAETVFPDVDYVNSTEAETILDNITQSTQSFNDFTRVVGGEDAKPGQFPWQVVLNGKVDAFCGGSIVNEKWIVTAAHCVETGVKITVVAGEHNIEETEHTEQKRNVIRIIPHHNYNAAINKYNHDIALLELDEPLVLNSYVTPICIADKEYTNIFLKFGSGYVSGWGRVFHKGRSALVLQYLRVPLVDRATCLRSTKFTIYNNMFCAGFHEGGRDSCQGDSGGPHVTEVEGTSFLTGIISWGEECAMKGKYGIYTKVSRYVNWIKEKTKLT

SEQ ID NO: 226 - protein, 421 aa, Artificial
  Human Factor IX variant with more than one N-linked glycan attachment consensus sequence inserted
  misc_feature (106)..(106): Xaa can be any amino acid except Pro
  misc_feature (107)..(107): Xaa can be Ser or Thr
  misc_feature (124)..(124): Xaa can be any amino acid except Pro
  misc_feature (125)..(125): Xaa can Ser or Thr
YNSGKLEEFVQGNLERECMEEKCSFEEAREVFENTERTTEFWKQYVDGDQCESNPCLNGGSCKDDINSYECWCPFGFEGKNCELDVTCNIKNGRCEQFCKNSADNXXNKVVCSCTEGYRLAENXXNQKSCEPAVPFPCGRVSVSQTSKLTRAETVFPDVDYVNSTEAETILDNITQSTQSFNDFTRVVGGEDAKPGQFPWQVVLNGKVDAFCGGSIVNEKWIVTAAHCVETGVKITVVAGEHNIEETEHTEQKRNVIRIIPHHNYNAAINKYNHDIALLELDEPLVLNSYVTPICIADKEYTNIFLKFGSGYVSGWGRVFHKGRSALVLQYLRVPLVDRATCLRSTKFTIYNNMFCAGFHEGGRDSCQGDSGGPHVTEVEGTSFLTGIISWGEECAMKGKYGIYTKVSRYVNWIKEKTKLT

SEQ ID NO: 227 - protein, 424 aa, Artificial
  Human Factor IX variant with more than one N-linked glycan attachment consensus sequence inserted
  misc_feature (107)..(107): Xaa can be any amino acid except Pro
  misc_feature (108)..(108): Xaa can be Ser or Thr
  misc_feature (124)..(124): Xaa can be any amino acid except Pro
  misc_feature (125)..(125): Xaa can Ser or Thr
  misc_feature (136)..(136): Xaa can be any amino acid except Pro
  misc_feature (137)..(137): Xaa can be Ser or Thr
YNSGKLEEFVQGNLERECMEEKCSFEEAREVFENTERTTEFWKQYVDGDQCESNPCLNGGSCKDDINSYECWCPFGFEGKNCELDVTCNIKNGRCEQFCKNSADNNXXKVVCSCTEGYRLAENXXNQKSCEPAVNXXPFPCGRVSVSQTSKLTRAETVFPDVDYVNSTEAETILDNITQSTQSFNDFTRVVGGEDAKPGQFPWQVVLNGKVDAFCGGSIVNEKWIVTAAHCVETGVKITVVAGEHNIEETEHTEQKRNVIRIIPHHNYNAAINKYNHDIALLELDEPLVLNSYVTPICIADKEYTNIFLKFGSGYVSGWGRVFHKGRSALVLQYLRVPLVDRATCLRSTKFTIYNNMFCAGFHEGGRDSCQGDSGGPHVTEVEGTSFLTGIISWGEECAMKGKYGIYTKVSRYVNWIKEKTKLT

SEQ ID NO: 228 - protein, 430 aa, Artificial
  Human Factor IX variant with more than one N-linked glycan attachment consensus sequence inserted
  misc_feature (48)..(49): Xaa can be any naturally occurring amino acid
  misc_feature (58)..(58): Xaa can be any amino acid except Pro
  misc_feature (59)..(59): Xaa can be Ser or Thr
  misc_feature (98)..(98): Xaa can be any amino acid except Pro
  misc_feature (99)..(99): Xaa can be Ser or Thr
  misc_feature (114)..(114): Xaa can be any amino acid except Pro
  misc_feature (115)..(115): Xaa can be Ser or Thr
  misc_feature (133)..(133): Xaa can be any amino acid except Pro
  misc_feature (134)..(134): Xaa can be Ser or Thr
YNSGKLEEFVQGNLERECMEEKCSFEEAREVFENTERTTEFWKQYVNXXDGDQCESNXXNPCLNGGSCKDDINSYECWCPFGFEGKNCELDVTCNINXXKNGRCEQFCKNSANXXDNKVVCSCTEGYRLAENXXNQKSCEPAVPFPCGRVSVSQTSKLTRAETVFPDVDYVNSTEAETILDNITQSTQSFNDFTRVVGGEDAKPGQFPWQVVLNGKVDAFCGGSIVNEKWIVTAAHCVETGVKITVVAGEHNIEETEHTEQKRNVIRIIPHHNYNAAINKYNHDIALLELDEPLVLNSYVTPICIADKEYTNIFLKFGSGYVSGWGRVFHKGRSALVLQYLRVPLVDRATCLRSTKFTIYNNMFCAGFHEGGRDSCQGDSGGPHVTEVEGTSFLTGIISWGEECAMKGKYGIYTKVSRYVNWIKEKTKLT

SEQ ID NO: 229 - protein, 433 aa, Artificial
  Human Factor IX variant with more than one N-linked glycan attachment consensus sequence inserted
  misc_feature (55)..(55): Xaa can be any amino acid except Pro
  misc_feature (56)..(56): Xaa can be Ser or Thr
  misc_feature (95)..(95): Xaa can be any amino acid except Pro
  misc_feature (96)..(96): Xaa can be Ser or Thr
  misc_feature (111)..(111): Xaa can be any amino acid except Pro
  misc_feature (112)..(112): Xaa can be Ser or Thr
  misc_feature (131)..(131): Xaa can be any amino acid except Pro
  misc_feature (132)..(132): Xaa can be Ser or Thr
  misc_feature (142)..(142): Xaa can be any amino acid except Pro
  misc_feature (143)..(143): Xaa can be Ser or Thr
  misc_feature (218)..(218): Xaa can be any amino acid except Pro
  misc_feature (219)..(219): Xaa can be Ser or Thr
YNSGKLEEFVQGNLERECMEEKCSFEEAREVFENTERTTEFWKQYVDGDQCESNXXNPCLNGGSCKDDINSYECWCPFGFEGKNCELDVTCNINXXKNGRCEQFCKNSANXXDNKVVCSCTEGYRLAENNXXQKSCEPAVNXXPFPCGRVSVSQTSKLTRAETVFPDVDYVNSTEAETILDNITQSTQSFNDFTRVVGGEDAKPGQFPWQVVLNGKNXXVDAFCGGSIVNEKWIVTAAHCVETGVKITVVAGEHNIEETEHTEQKRNVIRIIPHHNYNAAINKYNHDIALLELDEPLVLNSYVTPICIADKEYTNIFLKFGSGYVSGWGRVFHKGRSALVLQYLRVPLVDRATCLRSTKFTIYNNMFCAGFHEGGRDSCQGDSGGPHVTEVEGTSFLTGIISWGEECAMKGKYGIYTKVSRYVNWIKEKTKLT

SEQ ID NO: 230 - protein, 421 aa, Artificial
  Human Factor IX variant with more than one N-linked glycan attachment consensus sequence inserted
  misc_feature (203)..(203): Xaa can be any amino acid except Pro
  misc_feature (204)..(204): Xaa can be Ser or Thr
  misc_feature (209)..(209): Xaa can be any amino acid except Pro
  misc_feature (210)..(210): Xaa can be Ser or Thr
YNSGKLEEFVQGNLERECMEEKCSFEEAREVFENTERTTEFWKQYVDGDQCESNPCLNGGSCKDDINSYECWCPFGFEGKNCELDVTCNIKNGRCEQFCKNSADNKVVCSCTEGYRLAENQKSCEPAVPFPCGRVSVSQTSKLTRAETVFPDVDYVNSTEAETILDNITQSTQSFNDFTRVVGGEDAKPGQFPWQVVLNGKNXXVDANXXFCGGSIVNEKWIVTAAHCVETGVKITVVAGEHNIEETEHTEQKRNVIRIIPHHNYNAAINKYNHDIALLELDEPLVLNSYVTPICIADKEYTNIFLKFGSGYVSGWGRVFHKGRSALVLQYLRVPLVDRATCLRSTKFTIYNNMFCAGFHEGGRDSCQGDSGGPHVTEVEGTSFLTGIISWGEECAMKGKYGIYTKVSRYVNWIKEKTKLT

SEQ ID NO: 231 - protein, 421 aa, Artificial
  Human Factor IX variant with more than one N-linked glycan attachment consensus sequence inserted
  misc_feature (203)..(203): Xaa can be any amino acid except Pro
  misc_feature (204)..(204): Xaa can be Ser or Thr
  misc_feature (243)..(243): Xaa can be any amino acid except Pro
  misc_feature (244)..(244): Xaa can be Ser or Thr
YNSGKLEEFVQGNLERECMEEKCSFEEAREVFENTERTTEFWKQYVDGDQCESNPCLNGGSCKDDINSYECWCPFGFEGKNCELDVTCNIKNGRCEQFCKNSADNKVVCSCTEGYRLAENQKSCEPAVPFPCGRVSVSQTSKLTRAETVFPDVDYVNSTEAETILDNITQSTQSFNDFTRVVGGEDAKPGQFPWQVVLNGKNXXVDAFCGGSIVNEKWIVTAAHCVETGVKITVVAGEHNINXXEETEHTEQKRNVIRIIPHHNYNAAINKYNHDIALLELDEPLVLNSYVTPICIADKEYTNIFLKFGSGYVSGWGRVFHKGRSALVLQYLRVPLVDRATCLRSTKFTIYNNMFCAGFHEGGRDSCQGDSGGPHVTEVEGTSFLTGIISWGEECAMKGKYGIYTKVSRYVNWIKEKTKLT

SEQ ID NO: 232 - protein, 421 aa, Artificial
  Human Factor IX variant with more than one N-linked glycan attachment consensus sequence inserted
  misc_feature (203)..(203): Xaa can be any amino acid except Pro
  misc_feature (204)..(204): Xaa can be Ser or Thr
  misc_feature (244)..(244): Xaa can be any amino acid except Pro
  misc_feature (245)..(245): Xaa can be Ser or Thr
YNSGKLEEFVQGNLERECMEEKCSFEEAREVFENTERTTEFWKQYVDGDQCESNPCLNGGSCKDDINSYECWCPFGFEGKNCELDVTCNIKNGRCEQFCKNSADNKVVCSCTEGYRLAENQKSCEPAVPFPCGRVSVSQTSKLTRAETVFPDVDYVNSTEAETILDNITQSTQSFNDFTRVVGGEDAKPGQFPWQVVLNGKNXXVDAFCGGSIVNEKWIVTAAHCVETGVKITVVAGEHNIENXXETEHTEQKRNVIRIIPHHNYNAAINKYNHDIALLELDEPLVLNSYVTPICIADKEYTNIFLKFGSGYVSGWGRVFHKGRSALVLQYLRVPLVDRATCLRSTKFTIYNNMFCAGFHEGGRDSCQGDSGGPHVTEVEGTSFLTGIISWGEECAMKGKYGIYTKVSRYVNWIKEKTKLT

SEQ ID NO: 233 - protein, 421 aa, Artificial
  Human Factor IX variant with more than one N-linked glycan attachment consensus sequence inserted
  misc_feature (204)..(204): Xaa can be any amino acid except Pro
  misc_feature (205)..(205): Xaa can be Ser or Thr
  misc_feature (242)..(242): Xaa can be any amino acid except Pro
  misc_feature (243)..(243): Xaa can be Ser or Thr
YNSGKLEEFVQGNLERECMEEKCSFEEAREVFENTERTTEFWKQYVDGDQCESNPCLNGGSCKDDINSYECWCPFGFEGKNCELDVTCNIKNGRCEQFCKNSADNKVVCSCTEGYRLAENQKSCEPAVPFPCGRVSVSQTSKLTRAETVFPDVDYVNSTEAETILDNITQSTQSFNDFTRVVGGEDAKPGQFPWQVVLNGKVNXXDAFCGGSIVNEKWIVTAAHCVETGVKITVVAGEHNNXXIEETEHTEQKRNVIRIIPHHNYNAAINKYNHDIALLELDEPLVLNSYVTPICIADKEYTNIFLKFGSGYVSGWGRVFHKGRSALVLQYLRVPLVDRATCLRSTKFTIYNNMFCAGFHEGGRDSCQGDSGGPHVTEVEGTSFLTGIISWGEECAMKGKYGIYTKVSRYVNWIKEKTKLT

SEQ ID NO: 234 - protein, 424 aa, Artificial
  Human Factor IX variant with more than one N-linked glycan attachment consensus sequence inserted
  misc_feature (121)..(121): Xaa can be any amino acid except Pro
  misc_feature (122)..(122): Xaa can be Ser or Thr
  misc_feature (206)..(206): Xaa can be any amino acid except Pro
  misc_feature (207)..(207): Xaa can be Ser or Thr
  misc_feature (248)..(248): Xaa can be any amino acid except Pro
  misc_feature (249)..(249): Xaa can be Ser or Thr
YNSGKLEEFVQGNLERECMEEKCSFEEAREVFENTERTTEFWKQYVDGDQCESNPCLNGGSCKDDINSYECWCPFGFEGKNCELDVTCNIKNGRCEQFCKNSADNKVVCSCTEGYRLAENXXNQKSCEPAVPFPCGRVSVSQTSKLTRAETVFPDVDYVNSTEAETILDNITQSTQSFNDFTRVVGGEDAKPGQFPWQVVLNGKNXXVDAFCGGSIVNEKWIVTAAHCVETGVKITVVAGEHNIEENXXTEHTEQKRNVIRIIPHHNYNAAINKYNHDIALLELDEPLVLNSYVTPICIADKEYTNIFLKFGSGYVSGWGRVFHKGRSALVLQYLRVPLVDRATCLRSTKFTIYNNMFCAGFHEGGRDSCQGDSGGPHVTEVEGTSFLTGIISWGEECAMKGKYGIYTKVSRYVNWIKEKTKLT

SEQ ID NO: 235 - protein, 424 aa, Artificial
  Human Factor IX variant with more than one N-linked glycan attachment consensus sequence inserted
  misc_feature (205)..(205): Xaa can be any amino acid except Pro
  misc_feature (206)..(206): Xaa can be Ser or Thr
  misc_feature (244)..(244): Xaa can be any amino acid except Pro
  misc_feature (245)..(245): Xaa can be Ser or Thr
  misc_feature (284)..(284): Xaa can be any amino acid except Pro
  misc_feature (285)..(285): Xaa can be Ser or Thr
YNSGKLEEFVQGNLERECMEEKCSFEEAREVFENTERTTEFWKQYVDGDQCESNPCLNGGSCKDDINSYECWCPFGFEGKNCELDVTCNIKNGRCEQFCKNSADNKVVCSCTEGYRLAENQKSCEPAVPFPCGRVSVSQTSKLTRAETVFPDVDYVNSTEAETILDNITQSTQSFNDFTRVVGGEDAKPGQFPWQVVLNGKVDNXXAFCGGSIVNEKWIVTAAHCVETGVKITVVAGEHNIENXXETEHTEQKRNVIRIIPHHNYNAAINKYNHDIALLELDNXXEPLVLNSYVTPICIADKEYTNIFLKFGSGYVSGWGRVFHKGRSALVLQYLRVPLVDRATCLRSTKFTIYNNMFCAGFHEGGRDSCQGDSGGPHVTEVEGTSFLTGIISWGEECAMKGKYGIYTKVSRYVNWIKEKTKLT

SEQ ID NO: 236 - protein, 433 aa, Artificial
  Human Factor IX variant with more than one N-linked glycan attachment consensus sequence inserted
  misc_feature (202)..(202): Xaa can be any amino acid except Pro
  misc_feature (203)..(203): Xaa can be Ser or Thr
  misc_feature (244)..(244): Xaa can be any amino acid except Pro
  misc_feature (245)..(245): Xaa can be Ser or Thr
  misc_feature (285)..(285): Xaa can be any amino acid except Pro
  misc_feature (286)..(286): Xaa can be Ser or Thr
  misc_feature (304)..(304): Xaa can be any amino acid except Pro
  misc_feature (305)..(305): Xaa can be Ser or Thr
  misc_feature (326)..(326): Xaa can be any amino acid except Pro
  misc_feature (327)..(327): Xaa can be Ser or Thr
  misc_feature (332)..(332): Xaa can be any amino acid except Pro
  misc_feature (333)..(333): Xaa can be Ser or Thr
YNSGKLEEFVQGNLERECMEEKCSFEEAREVFENTERTTEFWKQYVDGDQCESNPCLNGGSCKDDINSYECWCPFGFEGKNCELDVTCNIKNGRCEQFCKNSADNKVVCSCTEGYRLAENQKSCEPAVPFPCGRVSVSQTSKLTRAETVFPDVDYVNSTEAETILDNITQSTQSFNDFTRVVGGEDAKPGQFPWQVVLNGNXXKVDAFCGGSIVNEKWIVTAAHCVETGVKITVVAGEHNIENXXETEHTEQKRNVIRIIPHHNYNAAINKYNHDIALLELDENXXPLVLNSYVTPICIADKNXXEYTNIFLKFGSGYVSGWGRNXXVFHNXXKGRSALVLQYLRVPLVDRATCLRSTKFTIYNNMFCAGFHEGGRDSCQGDSGGPHVTEVEGTSFLTGIISWGEECAMKGKYGIYTKVSRYVNWIKEKTKLT

SEQ ID NO: 237 - protein, 421 aa, Artificial
  Human Factor IX variant with more than one N-linked glycan attachment consensus sequence inserted
  misc_feature (295)..(295): Xaa can be any amino acid except Pro
  misc_feature (296)..(296): Xaa can be Ser or Thr
  misc_feature (392)..(392): Xaa can be any amino acid except Pro
  misc_feature (393)..(393): Xaa can be Ser or Thr
YNSGKLEEFVQGNLERECMEEKCSFEEAREVFENTERTTEFWKQYVDGDQCESNPCLNGGSCKDDINSYECWCPFGFEGKNCELDVTCNIKNGRCEQFCKNSADNKVVCSCTEGYRLAENQKSCEPAVPFPCGRVSVSQTSKLTRAETVFPDVDYVNSTEAETILDNITQSTQSFNDFTRVVGGEDAKPGQFPWQVVLNGKVDAFCGGSIVNEKWIVTAAHCVETGVKITVVAGEHNIEETEHTEQKRNVIRIIPHHNYNAAINKYNHDIALLELDEPLVLNSYVTPICIADKNXXEYTNIFLKFGSGYVSGWGRVFHKGRSALVLQYLRVPLVDRATCLRSTKFTIYNNMFCAGFHEGGRDSCQGDSGGPHVTEVEGTSFLTGIISWGENXXECAMKGKYGIYTKVSRYVNWIKEKTKLT

SEQ ID NO: 238 - protein, 424 aa, Artificial
  Human Factor IX variant with more than one N-linked glycan attachment consensus sequence inserted
  misc_feature (295)..(295): Xaa can be any amino acid except Pro
  misc_feature (296)..(296): Xaa can be Ser or Thr
  misc_feature (317)..(317): Xaa can be any amino acid except Pro
  misc_feature (318)..(318): Xaa can be Ser or Thr
  misc_feature (324)..(324): Xaa can be any amino acid except Pro
  misc_feature (325)..(325): Xaa can be Ser or Thr
YNSGKLEEFVQGNLERECMEEKCSFEEAREVFENTERTTEFWKQYVDGDQCESNPCLNGGSCKDDINSYECWCPFGFEGKNCELDVTCNIKNGRCEQFCKNSADNKVVCSCTEGYRLAENQKSCEPAVPFPCGRVSVSQTSKLTRAETVFPDVDYVNSTEAETILDNITQSTQSFNDFTRVVGGEDAKPGQFPWQVVLNGKVDAFCGGSIVNEKWIVTAAHCVETGVKITVVAGEHNIEETEHTEQKRNVIRIIPHHNYNAAINKYNHDIALLELDEPLVLNSYVTPICIADKNXXEYTNIFLKFGSGYVSGWGRNXXVFHKNXXGRSALVLQYLRVPLVDRATCLRSTKFTIYNNMFCAGFHEGGRDSCQGDSGGPHVTEVEGTSFLTGIISWGEECAMKGKYGIYTKVSRYVNWIKEKTKLT

SEQ ID NO: 239 - protein, 427 aa, Artificial
  Human Factor IX variant with more than one N-linked glycan attachment consensus sequence inserted
  misc_feature (295)..(295): Xaa can be any amino acid except Pro
  misc_feature (296)..(296): Xaa can be Ser or Thr
  misc_feature (317)..(317): Xaa can be any amino acid except Pro
  misc_feature (318)..(318): Xaa can be Ser or Thr
  misc_feature (395)..(395): Xaa can be any amino acid except Pro
  misc_feature (396)..(396): Xaa can be Ser or Thr
  misc_feature (404)..(404): Xaa can be any amino acid except Pro
  misc_feature (405)..(405): Xaa can be Ser or Thr
YNSGKLEEFVQGNLERECMEEKCSFEEAREVFENTERTTEFWKQYVDGDQCESNPCLNGGSCKDDINSYECWCPFGFEGKNCELDVTCNIKNGRCEQFCKNSADNKVVCSCTEGYRLAENQKSCEPAVPFPCGRVSVSQTSKLTRAETVFPDVDYVNSTEAETILDNITQSTQSFNDFTRVVGGEDAKPGQFPWQVVLNGKVDAFCGGSIVNEKWIVTAAHCVETGVKITVVAGEHNIEETEHTEQKRNVIRIIPHHNYNAAINKYNHDIALLELDEPLVLNSYVTPICIADKNXXEYTNIFLKFGSGYVSGWGRNXXVFHKGRSALVLQYLRVPLVDRATCLRSTKFTIYNNMFCAGFHEGGRDSCQGDSGGPHVTEVEGTSFLTGIISWGENXXECAMKGNXXKYGIYTKVSRYVNWIKEKTKLT

SEQ ID NO: 240 - protein, 421 aa, Artificial
  Human Factor IX variant with more than one N-linked glycan attachment consensus sequence inserted
  misc_feature (388)..(388): Xaa can be any amino acid except Pro
  misc_feature (389)..(389): Xaa can be Ser or Thr
  misc_feature (397)..(397): Xaa can be any amino acid except Pro
  misc_feature (398)..(398): Xaa can be Ser or Thr
YNSGKLEEFVQGNLERECMEEKCSFEEAREVFENTERTTEFWKQYVDGDQCESNPCLNGGSCKDDINSYECWCPFGFEGKNCELDVTCNIKNGRCEQFCKNSADNKVVCSCTEGYRLAENQKSCEPAVPFPCGRVSVSQTSKLTRAETVFPDVDYVNSTEAETILDNITQSTQSFNDFTRVVGGEDAKPGQFPWQVVLNGKVDAFCGGSIVNEKWIVTAAHCVETGVKITVVAGEHNIEETEHTEQKRNVIRIIPHHNYNAAINKYNHDIALLELDEPLVLNSYVTPICIADKEYTNIFLKFGSGYVSGWGRVFHKGRSALVLQYLRVPLVDRATCLRSTKFTIYNNMFCAGFHEGGRDSCQGDSGGPHVTEVEGTSFLTGIISWGNXXEECAMKNXXGKYGIYTKVSRYVNWIKEKTKLT

SEQ ID NO: 241 - protein, 424 aa, Artificial
  Human Factor IX variant with more than one N-linked glycan attachment consensus sequence inserted
  misc_feature (388)..(388): Xaa can be any amino acid except Pro
  misc_feature (389)..(389): Xaa can be Ser or Thr
  misc_feature (397)..(397): Xaa can be any amino acid except Pro
  misc_feature (398)..(398): Xaa can be Ser or Thr
  misc_feature (417)..(417): Xaa can be any amino acid except Pro
  misc_feature (418)..(418): Xaa can be Ser or Thr
YNSGKLEEFVQGNLERECMEEKCSFEEAREVFENTERTTEFWKQYVDGDQCESNPCLNGGSCKDDINSYECWCPFGFEGKNCELDVTCNIKNGRCEQFCKNSADNKVVCSCTEGYRLAENQKSCEPAVPFPCGRVSVSQTSKLTRAETVFPDVDYVNSTEAETILDNITQSTQSFNDFTRVVGGEDAKPGQFPWQVVLNGKVDAFCGGSIVNEKWIVTAAHCVETGVKITVVAGEHNIEETEHTEQKRNVIRIIPHHNYNAAINKYNHDIALLELDEPLVLNSYVTPICIADKEYTNIFLKFGSGYVSGWGRVFHKGRSALVLQYLRVPLVDRATCLRSTKFTIYNNMFCAGFHEGGRDSCQGDSGGPHVTEVEGTSFLTGIISWGNXXEECAMKNXXGKYGIYTKVSRYVNWIKNXXEKTKLT

SEQ ID NO: 242 - protein, 427 aa, Artificial
  Human Factor IX variant with more than one N-linked glycan attachment consensus sequence inserted
  misc_feature (389)..(389): Xaa can be any amino acid except Pro
  misc_feature (390)..(390): Xaa can be Ser or Thr
  misc_feature (398)..(398): Xaa can be any amino acid except Pro
  misc_feature (399)..(399): Xaa can be Ser or Thr
  misc_feature (418)..(418): Xaa can be any amino acid except Pro
  misc_feature (419)..(419): Xaa can be Ser or Thr
  misc_feature (425)..(425): Xaa can be any amino acid except Pro
  misc_feature (426)..(426): Xaa can be Ser or Thr
YNSGKLEEFVQGNLERECMEEKCSFEEAREVFENTERTTEFWKQYVDGDQCESNPCLNGGSCKDDINSYECWCPFGFEGKNCELDVTCNIKNGRCEQFCKNSADNKVVCSCTEGYRLAENQKSCEPAVPFPCGRVSVSQTSKLTRAETVFPDVDYVNSTEAETILDNITQSTQSFNDFTRVVGGEDAKPGQFPWQVVLNGKVDAFCGGSIVNEKWIVTAAHCVETGVKITVVAGEHNIEETEHTEQKRNVIRIIPHHNYNAAINKYNHDIALLELDEPLVLNSYVTPICIADKEYTNIFLKFGSGYVSGWGRVFHKGRSALVLQYLRVPLVDRATCLRSTKFTIYNNMFCAGFHEGGRDSCQGDSGGPHVTEVEGTSFLTGIISWGENXXECAMKGNXXKYGIYTKVSRYVNWIKENXXKTKLNXXT

SEQ ID NO: 243 - protein, 421 aa, Artificial
  Human Factor IX variant with more than one N-linked glycan attachment consensus sequence inserted
  misc_feature (279)..(279): Xaa can be any amino acid except Pro
  misc_feature (280)..(280): Xaa can be Ser or Thr
  misc_feature (418)..(418): Xaa can be any amino acid except Pro
  misc_feature (419)..(419): Xaa can be Ser or Thr
YNSGKLEEFVQGNLERECMEEKCSFEEAREVFENTERTTEFWKQYVDGDQCESNPCLNGGSCKDDINSYECWCPFGFEGKNCELDVTCNIKNGRCEQFCKNSADNKVVCSCTEGYRLAENQKSCEPAVPFPCGRVSVSQTSKLTRAETVFPDVDYVNSTEAETILDNITQSTQSFNDFTRVVGGEDAKPGQFPWQVVLNGKVDAFCGGSIVNEKWIVTAAHCVETGVKITVVAGEHNIEETEHTEQKRNVIRIIPHHNYNAAINKYNHDIALLELDENXXPLVLNSYVTPICIADKEYTNIFLKFGSGYVSGWGRVFHKGRSALVLQYLRVPLVDRATCLRSTKFTIYNNMFCAGFHEGGRDSCQGDSGGPHVTEVEGTSFLTGIISWGEECAMKGKYGIYTKVSRYVNWIKEKTKNXXLT

SEQ ID NO: 244 - protein, 421 aa, Artificial
  Human Factor IX variant with more than one N-linked glycan attachment consensus sequence inserted
  misc_feature (106)..(106): Xaa can be any amino acid except Pro
  misc_feature (107)..(107): Xaa can be Ser or Thr
  misc_feature (415)..(415): Xaa can be any amino acid except Pro
  misc_feature (416)..(416): Xaa can be Ser or Thr
YNSGKLEEFVQGNLERECMEEKCSFEEAREVFENTERTTEFWKQYVDGDQCESNPCLNGGSCKDDINSYECWCPFGFEGKNCELDVTCNIKNGRCEQFCKNSADNXXNKVVCSCTEGYRLAENQKSCEPAVPFPCGRVSVSQTSKLTRAETVFPDVDYVNSTEAETILDNITQSTQSFNDFTRVVGGEDAKPGQFPWQVVLNGKVDAFCGGSIVNEKWIVTAAHCVETGVKITVVAGEHNIEETEHTEQKRNVIRIIPHHNYNAAINKYNHDIALLELDEPLVLNSYVTPICIADKEYTNIFLKFGSGYVSGWGRVFHKGRSALVLQYLRVPLVDRATCLRSTKFTIYNNMFCAGFHEGGRDSCQGDSGGPHVTEVEGTSFLTGIISWGEECAMKGKYGIYTKVSRYVNWIKENXXKTKLT

SEQ ID NO: 245 - protein, 421 aa, Artificial
  Human Factor IX variant with more than one N-linked glycan attachment consensus sequence inserted
  misc_feature (107)..(107): Xaa can be any amino acid except Pro
  misc_feature (108)..(108): Xaa can be Ser or Thr
  misc_feature (398)..(398): Xaa can be any amino acid except Pro
  misc_feature (399)..(399): Xaa can be Ser or Thr
YNSGKLEEFVQGNLERECMEEKCSFEEAREVFENTERTTEFWKQYVDGDQCESNPCLNGGSCKDDINSYECWCPFGFEGKNCELDVTCNIKNGRCEQFCKNSADNNXXKVVCSCTEGYRLAENQKSCEPAVPFPCGRVSVSQTSKLTRAETVFPDVDYVNSTEAETILDNITQSTQSFNDFTRVVGGEDAKPGQFPWQVVLNGKVDAFCGGSIVNEKWIVTAAHCVETGVKITVVAGEHNIEETEHTEQKRNVIRIIPHHNYNAAINKYNHDIALLELDEPLVLNSYVTPICIADKEYTNIFLKFGSGYVSGWGRVFHKGRSALVLQYLRVPLVDRATCLRSTKFTIYNNMFCAGFHEGGRDSCQGDSGGPHVTEVEGTSFLTGIISWGEECAMKGNXXKYGIYTKVSRYVNWIKEKTKLT

SEQ ID NO: 246 - protein, 424 aa, Artificial
  Human Factor IX variant with more than one N-linked glycan attachment consensus sequence inserted
  misc_feature (55)..(55): Xaa can be any amino acid except Pro
  misc_feature (56)..(56): Xaa can be Ser or Thr
  misc_feature (395)..(395): Xaa can be any amino acid except Pro
  misc_feature (396)..(396): Xaa can be Ser or Thr
  misc_feature (421)..(421): Xaa can be any amino acid except Pro
  misc_feature (422)..(422): Xaa can be Ser or Thr
YNSGKLEEFVQGNLERECMEEKCSFEEAREVFENTERTTEFWKQYVDGDQCESNXXNPCLNGGSCKDDINSYECWCPFGFEGKNCELDVTCNIKNGRCEQFCKNSADNKVVCSCTEGYRLAENQKSCEPAVPFPCGRVSVSQTSKLTRAETVFPDVDYVNSTEAETILDNITQSTQSFNDFTRVVGGEDAKPGQFPWQVVLNGKVDAFCGGSIVNEKWIVTAAHCVETGVKITVVAGEHNIEETEHTEQKRNVIRIIPHHNYNAAINKYNHDIALLELDEPLVLNSYVTPICIADKEYTNIFLKFGSGYVSGWGRVFHKGRSALVLQYLRVPLVDRATCLRSTKFTIYNNMFCAGFHEGGRDSCQGDSGGPHVTEVEGTSFLTGIISWGEECANXXMKGKYGIYTKVSRYVNWIKEKTKNXXLT

SEQ ID NO: 247 - protein, 425 aa, Artificial
  Human Factor IX variant with more than one N-linked glycan attachment consensus sequence inserted
  misc_feature (394)..(394): Xaa can be any amino acid except Pro
  misc_feature (395)..(395): Xaa can be Ser or Thr
  misc_feature (420)..(420): Xaa can be any amino acid except Pro
  misc_feature (421)..(421): Xaa can be Ser or Thr
YNSGKLEEFVQGNLERECMEEKCSFEEAREVFENTERTTEFWKQYVDGDQCESNPCLNGGSCKDDINSYECWCPFGFEGKNCELDVTCNIKNGRCEQFCKNSADNKVVCSCTEGYRLAENQKSCEPAVPFPCGRVSVSQTSKLTRAETVFPDVDYVNSTEAETILDNITQSTQSFNDFTRVVGGEDAKPGQFPWQVVLNGKVDAFCGGSIVNEKWIVTAAHCVETGVKITVVAGEHNIEETEHTEQKRNVIRIIPHHNYNAAINKYNHDIALLELDEPLVLNSYVTPICIADKEYTNIFLKFGSGYVSGWGRVFHKGRSALVLQYLRVPLVDRATCLRSTKFTIYNNMFCAGFHEGGRDSCQGDSGGPHVTEVEGTSFLTGIISWGEECAMKNXXGKYGIYTKVSRYVNWIKEKTKLTNXXGAGA

SEQ ID NO: 248 - protein, 427 aa, Artificial
  Human Factor IX variant with more than one N-linked glycan attachment consensus sequence inserted
  misc_feature (295)..(295): Xaa can be any amino acid except Pro
  misc_feature (296)..(296): Xaa can be Ser or Thr
  misc_feature (320)..(320): Xaa can be any amino acid except Pro
  misc_feature (321)..(321): Xaa can be Ser or Thr
  misc_feature (399)..(399): Xaa can be any amino acid except Pro
  misc_feature (400)..(400): Xaa can be Ser or Thr
  misc_feature (425)..(425): Xaa can be any amino acid except Pro
  misc_feature (426)..(426): Xaa can be Ser or Thr
YNSGKLEEFVQGNLERECMEEKCSFEEAREVFENTERTTEFWKQYVDGDQCESNPCLNGGSCKDDINSYECWCPFGFEGKNCELDVTCNIKNGRCEQFCKNSADNKVVCSCTEGYRLAENQKSCEPAVPFPCGRVSVSQTSKLTRAETVFPDVDYVNSTEAETILDNITQSTQSFNDFTRVVGGEDAKPGQFPWQVVLNGKVDAFCGGSIVNEKWIVTAAHCVETGVKITVVAGEHNIEETEHTEQKRNVIRIIPHHNYNAAINKYNHDIALLELDEPLVLNSYVTPICIADKNXXEYTNIFLKFGSGYVSGWGRVFHNXXKGRSALVLQYLRVPLVDRATCLRSTKFTIYNNMFCAGFHEGGRDSCQGDSGGPHVTEVEGTSFLTGIISWGEECAMNXXKGKYGIYTKVSRYVNWIKEKTKLNXXT

SEQ ID NO: 249 - protein, 424 aa, Artificial
  Human Factor IX variant with more than one N-linked glycan attachment consensus sequence inserted
  misc_feature (45)..(45): Xaa can be any amino acid except Pro
  misc_feature (46)..(46): Xaa can be Ser or Thr
  misc_feature (168)..(168): Xaa can be any amino acid except Pro
  misc_feature (169)..(169): Xaa can be Ser or Thr
  misc_feature (418)..(418): Xaa can be any amino acid except Pro
  misc_feature (419)..(419): Xaa can be Ser or Thr
YNSGKLEEFVQGNLERECMEEKCSFEEAREVFENTERTTEFWKNXXQYVDGDQCESNPCLNGGSCKDDINSYECWCPFGFEGKNCELDVTCNIKNGRCEQFCKNSADNKVVCSCTEGYRLAENQKSCEPAVPFPCGRVSVSQTSKLTRAETVFPDVDYVNSTEAETNXXILDNITQSTQSFNDFTRVVGGEDAKPGQFPWQVVLNGKVDAFCGGSIVNEKWIVTAAHCVETGVKITVVAGEHNIEETEHTEQKRNVIRIIPHHNYNAAINKYNHDIALLELDEPLVLNSYVTPICIADKEYTNIFLKFGSGYVSGWGRVFHKGRSALVLQYLRVPLVDRATCLRSTKFTIYNNMFCAGFHEGGRDSCQGDSGGPHVTEVEGTSFLTGIISWGEECAMKGKYGIYTKVSRYVNWIKENXXKTKLT

SEQ ID NO: 250 - protein, 424 aa, Artificial
  Human Factor IX variant with more than one N-linked glycan attachment consensus sequence inserted
  misc_feature (150)..(150): Xaa can be any amino acid except Pro
  misc_feature (151)..(151): Xaa can be Ser or Thr
  misc_feature (181)..(181): Xaa can be any amino acid except Pro
  misc_feature (182)..(182): Xaa can be Ser or Thr
  misc_feature (400)..(400): Xaa can be any amino acid except Pro
  misc_feature (401)..(401): Xaa can be Ser or Thr
YNSGKLEEFVQGNLERECMEEKCSFEEAREVFENTERTTEFWKQYVDGDQCESNPCLNGGSCKDDINSYECWCPFGFEGKNCELDVTCNIKNGRCEQFCKNSADNKVVCSCTEGYRLAENQKSCEPAVPFPCGRVSVSQTSKLTRAETNXXVFPDVDYVNSTEAETILDNITQSTQSFNNXXDFTRVVGGEDAKPGQFPWQVVLNGKVDAFCGGSIVNEKWIVTAAHCVETGVKITVVAGEHNIEETEHTEQKRNVIRIIPHHNYNAAINKYNHDIALLELDEPLVLNSYVTPICIADKEYTNIFLKFGSGYVSGWGRVFHKGRSALVLQYLRVPLVDRATCLRSTKFTIYNNMFCAGFHEGGRDSCQGDSGGPHVTEVEGTSFLTGIISWGEECAMKNXXGKYGIYTKVSRYVNWIKEKTKLT

SEQ ID NO: 251 - protein, 453 aa, Artificial
  Human Factor IX variant with more than one N-linked glycan attachment consensus sequence inserted
  misc_feature (17)..(17): Xaa can be any amino acid except Pro
  misc_feature (18)..(18): Xaa can be Ser or Thr
  misc_feature (38)..(38): Xaa can be any amino acid except Pro
  misc_feature (39)..(39): Xaa can be Ser or Thr
  misc_feature (45)..(45): Xaa can be any amino acid except Pro
  misc_feature (46)..(46): Xaa can be Ser or Thr
  misc_feature (57)..(57): Xaa can be any amino acid except Pro
  misc_feature (58)..(58): Xaa can be Ser or Thr
  misc_feature (68)..(68): Xaa can be any amino acid except Pro
  misc_feature (69)..(69): Xaa can be Ser or Thr
  misc_feature (101)..(101): Xaa can be any amino acid except Pro
  misc_feature (102)..(102): Xaa can be Ser or Thr
  misc_feature (110)..(110): Xaa can be any amino acid except Pro
  misc_feature (111)..(111): Xaa can be Ser or Thr
  misc_feature (127)..(127): Xaa can be any amino acid except Pro
  misc_feature (128)..(128): Xaa can be Ser or Thr
  misc_feature (146)..(146): Xaa can be any amino acid except Pro
  misc_feature (147)..(147): Xaa can be Ser or Thr
  misc_feature (158)..(158): Xaa can be any amino acid except Pro
  misc_feature (159)..(159): Xaa can be Ser or Thr
  misc_feature (270)..(270): Xaa can be any amino acid except Pro
  misc_feature (271)..(271): Xaa can be Ser or Thr
  misc_feature (426)..(426): Xaa can be any amino acid except Pro
  misc_feature (427)..(427): Xaa can be Ser or Thr
  misc_feature (451)..(451): Xaa can be any amino acid except Pro
  misc_feature (452)..(452): Xaa can be Ser or Thr
YNSGKLEEFVQGNLENXXRECMEEKCSFEEAREVFENXXNTERNXXTTEFWKQYVNXXDGDQCESNNXXPCLNGGSCKDDINSYECWCPFGFEGKNCELNXXDVTCNINXXKNGRCEQFCKNSADNXXNKVVCSCTEGYRLAENNXXQKSCEPAVPNXXFPCGRVSVSQTSKLTRAETVFPDVDYVNSTEAETILDNITQSTQSFNDFTRVVGGEDAKPGQFPWQVVLNGKVDAFCGGSIVNEKWIVTAAHCVETGVKITVVAGEHNINXXETEHTEQKRNVIRIIPHHNYNAAINKYNHDIALLELDEPLVLNSYVTPICIADKEYTNIFLKFGSGYVSGWGRVFHKGRSALVLQYLRVPLVDRATCLRSTKFTIYNNMFCAGFHEGGRDSCQGDSGGPHVTEVEGTSFLTGIISWGEECAMKNXXGKYGIYTKVSRYVNWIKEKTKLNXXT

SEQ ID NO: 252 - protein, 415 aa, Artificial; identical to SEQ ID NO: 33
  Human Factor IX variant with O-linked glycan attachment consensus sequence inserted in locations outside the activation peptide, or in which combinations of O-linked and N-linked sequences are inserted

SEQ ID NO: 253 - protein, 415 aa, Artificial; identical to SEQ ID NO: 33
  Human Factor IX variant with O-linked glycan attachment consensus sequence inserted in locations outside the activation peptide, or in which combinations of O-linked and N-linked sequences are inserted

SEQ ID NO: 254 - protein, 415 aa, Artificial; identical to SEQ ID NO: 33
  Human Factor IX variant with O-linked glycan attachment consensus sequence inserted in locations outside the activation peptide, or in which combinations of O-linked and N-linked sequences are inserted

SEQ ID NO: 255 - protein, 415 aa, Artificial; identical to SEQ ID NO: 33
  Human Factor IX variant with O-linked glycan attachment consensus sequence inserted in locations outside the activation peptide, or in which combinations of O-linked and N-linked sequences are inserted

SEQ ID NO: 256 - protein, 415 aa, Artificial; identical to SEQ ID NO: 33
  Human Factor IX variant with O-linked glycan attachment consensus sequence inserted in locations outside the activation peptide, or in which combinations of O-linked and N-linked sequences are inserted

SEQ ID NO: 257 - protein, 415 aa, Artificial; identical to SEQ ID NO: 33
  Human Factor IX variant with O-linked glycan attachment consensus sequence inserted in locations outside the activation peptide, or in which combinations of O-linked and N-linked sequences are inserted

SEQ ID NO: 258 - protein, 415 aa, Artificial; identical to SEQ ID NO: 33
  Human Factor IX variant with O-linked glycan attachment consensus sequence inserted in locations outside the activation peptide, or in which combinations of O-linked and N-linked sequences are inserted

SEQ ID NO: 259 - protein, 415 aa, Artificial; identical to SEQ ID NO: 33
  Human Factor IX variant with O-linked glycan attachment consensus sequence inserted in locations outside the activation peptide, or in which combinations of O-linked and N-linked sequences are inserted

SEQ ID NO: 260 - protein, 415 aa, Artificial; identical to SEQ ID NO: 33
  Human Factor IX variant with O-linked glycan attachment consensus sequence inserted in locations outside the activation peptide, or in which combinations of O-linked and N-linked sequences are inserted

SEQ ID NO: 261 - protein, 415 aa, Artificial; identical to SEQ ID NO: 33
  Human Factor IX variant with O-linked glycan attachment consensus sequence inserted in locations outside the activation peptide, or in which combinations of O-linked and N-linked sequences are inserted

SEQ ID NO: 262 - protein, 415 aa, Artificial; identical to SEQ ID NO: 33
  Human Factor IX variant with O-linked glycan attachment consensus sequence inserted in locations outside the activation peptide, or in which combinations of O-linked and N-linked sequences are inserted

SEQ ID NO: 263 - protein, 415 aa, Artificial; identical to SEQ ID NO: 33
  Human Factor IX variant with O-linked glycan attachment consensus sequence inserted in locations outside the activation peptide, or in which combinations of O-linked and N-linked sequences are inserted

SEQ ID NO: 264 - protein, 415 aa, Artificial; identical to SEQ ID NO: 33
  Human Factor IX variant with O-linked glycan attachment consensus sequence inserted in locations outside the activation peptide, or in which combinations of O-linked and N-linked sequences are inserted

SEQ ID NO: 265 - protein, 415 aa, Artificial; identical to SEQ ID NO: 33
  Human Factor IX variant with O-linked glycan attachment consensus sequence inserted in locations outside the activation peptide, or in which combinations of O-linked and N-linked sequences are inserted

SEQ ID NO: 266 - protein, 415 aa, Artificial; identical to SEQ ID NO: 33
  Human Factor IX variant with O-linked glycan attachment consensus sequence inserted in locations outside the activation peptide, or in which combinations of O-linked and N-linked sequences are inserted

SEQ ID NO: 267 - protein, 415 aa, Artificial; identical to SEQ ID NO: 33
  Human Factor IX variant with O-linked glycan attachment consensus sequence inserted in locations outside the activation peptide, or in which combinations of O-linked and N-linked sequences are inserted

SEQ ID NO: 268 - protein, 415 aa, Artificial; identical to SEQ ID NO: 33
  Human Factor IX variant with O-linked glycan attachment consensus sequence inserted in locations outside the activation peptide, or in which combinations of O-linked and N-linked sequences are inserted

SEQ ID NO: 269 - protein, 415 aa, Artificial; identical to SEQ ID NO: 33
  Human Factor IX variant with O-linked glycan attachment consensus sequence inserted in locations outside the activation peptide, or in which combinations of O-linked and N-linked sequences are inserted

SEQ ID NO: 270 - protein, 415 aa, Artificial; identical to SEQ ID NO: 33
  Human Factor IX variant with O-linked glycan attachment consensus sequence inserted in locations outside the activation peptide, or in which combinations of O-linked and N-linked sequences are inserted

SEQ ID NO: 271 - protein, 415 aa, Artificial; identical to SEQ ID NO: 33
  Human Factor IX variant with O-linked glycan attachment consensus sequence inserted in locations outside the activation peptide, or in which combinations of O-linked and N-linked sequences are inserted

SEQ ID NO: 272 - protein, 415 aa, Artificial; identical to SEQ ID NO: 33
  Human Factor IX variant with O-linked glycan attachment consensus sequence inserted in locations outside the activation peptide, or in which combinations of O-linked and N-linked sequences are inserted

SEQ ID NO: 273 - protein, 415 aa, Artificial; identical to SEQ ID NO: 33
  Human Factor IX variant with O-linked glycan attachment consensus sequence inserted in locations outside the activation peptide, or in which combinations of O-linked and N-linked sequences are inserted

SEQ ID NO: 274 - protein, 415 aa, Artificial; identical to SEQ ID NO: 33
  Human Factor IX variant with O-linked glycan attachment consensus sequence inserted in locations outside the activation peptide, or in which combinations of O-linked and N-linked sequences are inserted

SEQ ID NO: 275 - protein, 415 aa, Artificial; identical to SEQ ID NO: 33
  Human Factor IX variant with O-linked glycan attachment consensus sequence inserted in locations outside the activation peptide, or in which combinations of O-linked and N-linked sequences are inserted

SEQ ID NO: 276 - protein, 415 aa, Artificial; identical to SEQ ID NO: 33
  Human Factor IX variant with O-linked glycan attachment consensus sequence inserted in locations outside the activation peptide, or in which combinations of O-linked and N-linked sequences are inserted

SEQ ID NO: 277 - protein, 415 aa, Artificial; identical to SEQ ID NO: 33
  Human Factor IX variant with O-linked glycan attachment consensus sequence inserted in locations outside the activation peptide, or in which combinations of O-linked and N-linked sequences are inserted

SEQ ID NO: 278 - protein, 415 aa, Artificial; identical to SEQ ID NO: 33
  Human Factor IX variant with O-linked glycan attachment consensus sequence inserted in locations outside the activation peptide, or in which combinations of O-linked and N-linked sequences are inserted

SEQ ID NO: 279 - protein, 415 aa, Artificial; identical to SEQ ID NO: 33
  Human Factor IX variant with O-linked glycan attachment consensus sequence inserted in locations outside the activation peptide, or in which combinations of O-linked and N-linked sequences are inserted

SEQ ID NO: 280 - protein, 415 aa, Artificial; identical to SEQ ID NO: 33
  Human Factor IX variant with O-linked glycan attachment consensus sequence inserted in locations outside the activation peptide, or in which combinations of O-linked and N-linked sequences are inserted

SEQ ID NO: 281 - protein, 415 aa, Artificial; identical to SEQ ID NO: 33
  Human Factor IX variant with O-linked glycan attachment consensus sequence inserted in locations outside the activation peptide, or in which combinations of O-linked and N-linked sequences are inserted

SEQ ID NO: 282 - protein, 415 aa, Artificial; identical to SEQ ID NO: 33
  Human Factor IX variant with O-linked glycan attachment consensus sequence inserted in locations outside the activation peptide, or in which combinations of O-linked and N-linked sequences are inserted

SEQ ID NO: 283 - protein, 415 aa, Artificial; identical to SEQ ID NO: 33
  Human Factor IX variant with O-linked glycan attachment consensus sequence inserted in locations outside the activation peptide, or in which combinations of O-linked and N-linked sequences are inserted

SEQ ID NO: 284 - protein, 415 aa, Artificial; identical to SEQ ID NO: 33
  Human Factor IX variant with O-linked glycan attachment consensus sequence inserted in locations outside the activation peptide, or in which combinations of O-linked and N-linked sequences are inserted

SEQ ID NO: 285 - protein, 415 aa, Artificial; identical to SEQ ID NO: 33
  Human Factor IX variant with O-linked glycan attachment consensus sequence inserted in locations outside the activation peptide, or in which combinations of O-linked and N-linked sequences are inserted

SEQ ID NO: 286 - protein, 415 aa, Artificial; identical to SEQ ID NO: 33
  Human Factor IX variant with O-linked glycan attachment consensus sequence inserted in locations outside the activation peptide, or in which combinations of O-linked and N-linked sequences are inserted

SEQ ID NO: 287 - protein, 415 aa, Artificial; identical to SEQ ID NO: 33
  Human Factor IX variant with O-linked glycan attachment consensus sequence inserted in locations outside the activation peptide, or in which combinations of O-linked and N-linked sequences are inserted

SEQ ID NO: 288 - protein, 415 aa, Artificial; identical to SEQ ID NO: 33
  Human Factor IX variant with O-linked glycan attachment consensus sequence inserted in locations outside the activation peptide, or in which combinations of O-linked and N-linked sequences are inserted

SEQ ID NO: 289 - protein, 415 aa, Artificial; identical to SEQ ID NO: 33
  Human Factor IX variant with O-linked glycan attachment consensus sequence inserted in locations outside the activation peptide, or in which combinations of O-linked and N-linked sequences are inserted

SEQ ID NO: 290 - protein, 415 aa, Artificial; identical to SEQ ID NO: 33
  Human Factor IX variant with O-linked glycan attachment consensus sequence inserted in locations outside the activation peptide, or in which combinations of O-linked and N-linked sequences are inserted

SEQ ID NO: 291 - protein, 415 aa, Artificial; identical to SEQ ID NO: 33
  Human Factor IX variant with O-linked glycan attachment consensus sequence inserted in locations outside the activation peptide, or in which combinations of O-linked and N-linked sequences are inserted

SEQ ID NO: 292 - protein, 415 aa, Artificial; identical to SEQ ID NO: 33
  Human Factor IX variant with O-linked glycan attachment consensus sequence inserted in locations outside the activation peptide, or in which combinations of O-linked and N-linked sequences are inserted

SEQ ID NO: 293 - protein, 415 aa, Artificial; identical to SEQ ID NO: 33
  Human Factor IX variant with O-linked glycan attachment consensus sequence inserted in locations outside the activation peptide, or in which combinations of O-linked and N-linked sequences are inserted

SEQ ID NO: 294 - protein, 415 aa, Artificial; identical to SEQ ID NO: 33
  Human Factor IX variant with O-linked glycan attachment consensus sequence inserted in locations outside the activation peptide, or in which combinations of O-linked and N-linked sequences are inserted

SEQ ID NO: 295 - protein, 415 aa, Artificial; identical to SEQ ID NO: 33
  Human Factor IX variant with O-linked glycan attachment consensus sequence inserted in locations outside the activation peptide, or in which combinations of O-linked and N-linked sequences are inserted

SEQ ID NO: 296 - protein, 415 aa, Artificial; identical to SEQ ID NO: 33
  Human Factor IX variant with O-linked glycan attachment consensus sequence inserted in locations outside the activation peptide, or in which combinations of O-linked and N-linked sequences are inserted

SEQ ID NO: 297 - protein, 415 aa, Artificial; identical to SEQ ID NO: 33
  Human Factor IX variant with O-linked glycan attachment consensus sequence inserted in locations outside the activation peptide, or in which combinations of O-linked and N-linked sequences are inserted

SEQ ID NO: 298 - protein, 415 aa, Artificial; identical to SEQ ID NO: 33
  Human Factor IX variant with O-linked glycan attachment consensus sequence inserted in locations outside the activation peptide, or in which combinations of O-linked and N-linked sequences are inserted

SEQ ID NO: 299 - protein, 415 aa, Artificial; identical to SEQ ID NO: 33
  Human Factor IX variant with O-linked glycan attachment consensus sequence inserted in locations outside the activation peptide, or in which combinations of O-linked and N-linked sequences are inserted

SEQ ID NO: 300 - protein, 415 aa, Artificial; identical to SEQ ID NO: 33
  Human Factor IX variant with O-linked glycan attachment consensus sequence inserted in locations outside the activation peptide, or in which combinations of O-linked and N-linked sequences are inserted

SEQ ID NO: 301 - protein, 415 aa, Artificial; identical to SEQ ID NO: 33
  Human Factor IX variant with O-linked glycan attachment consensus sequence inserted in locations outside the activation peptide, or in which combinations of O-linked and N-linked sequences are inserted

SEQ ID NO: 302 - protein, 415 aa, Artificial; identical to SEQ ID NO: 33
  Human Factor IX variant with O-linked glycan attachment consensus sequence inserted in locations outside the activation peptide, or in which combinations of O-linked and N-linked sequences are inserted

SEQ ID NO: 303 - protein, 415 aa, Artificial; identical to SEQ ID NO: 33
  Human Factor IX variant with O-linked glycan attachment consensus sequence inserted in locations outside the activation peptide, or in which combinations of O-linked and N-linked sequences are inserted

SEQ ID NO: 304 - protein, 415 aa, Artificial; identical to SEQ ID NO: 33
  Human Factor IX variant with O-linked glycan attachment consensus sequence inserted in locations outside the activation peptide, or in which combinations of O-linked and N-linked sequences are inserted

SEQ ID NO: 305 - protein, 14 aa, Ornithorhynchus anatinus
VTIDQVSVKEVNQT

SEQ ID NO: 306 - protein, 429 aa, Artificial
  Human Factor IX variant with platypus-specific peptide
YNSGKLEEFVQGNLERECMEEKCSFEEAREVFENTERTTEFWKQYVDGDQCESNPCLNGGSCKDDINSYECWCPFGFEGKNCELDVTCNIKNGRCEQFCKNSADNKVVCSCTEGYRLAENQKSCEPAVPFPCGRVSVSQTSKLTRAETVFPDVDYVNSTEAETILDVTIDQVSVKEVNQTNITQSTQSFNDFTRVVGGEDAKPGQFPWQVVLNGKVDAFCGGSIVNEKWIVTAAHCVETGVKITVVAGEHNIEETEHTEQKRNVIRIIPHHNYNAAINKYNHDIALLELDEPLVLNSYVTPICIADKEYTNIFLKFGSGYVSGWGRVFHKGRSALVLQYLRVPLVDRATCLRSTKFTIYNNMFCAGFHEGGRDSCQGDSGGPHVTEVEGTSFLTGIISWGEECAMKGKYGIYTKVSRYVNWIKEKTKLT

1. An isolated Factor IX (FIX) protein variant comprising one or more than one additional glycosylation site as compared to wild type Factor IX.

2. The FIX variant of claim 1, wherein at least one of the one or more than one additional glycosylation sites is in the activation peptide.

3. The FIX variant of claim 1, comprising a peptide segment inserted between position N157 and N167 of the human FIX amino acid sequence of SEQ ID NO:33.

4. The FIX variant of claim 3, wherein the peptide segment comprises 3-100 amino acid residues.

5. The FIX variant of claim 4, wherein the peptide segment comprises at least part of a mouse Factor IX activation peptide.

6. The FIX variant of claim 5, wherein the mouse activation peptide is modified to increase the number of glycosylation sites.

7. The FIX variant of claim 1, wherein the one or more than one additional glycosylation sites are selected from N-linked glycosylation site(s), O-linked glycosylation site(s) and a combination of N-linked glycosylation site(s) and O-linked glycosylation site(s).

8. The FIX variant of claim 7, wherein the glycosylation site(s) comprise N-linked glycosylation site(s) comprising a consensus sequence NXT/S, with the proviso that X is not proline.

9. The FIX variant of claim 7, wherein the glycosylation site(s) comprise O-linked glycosylation site(s) comprising a consensus sequence selected from the group consisting of CXXGGT/S-C (SEQ ID NO:9), NSTE/DA (SEQ ID NO:10), NITQS (SEQ ID NO:11), QSTQS (SEQ ID NO:12), D/E-FT-R/K-V (SEQ ID NO:13), C-E/D-SN (SEQ ID NO:14), GGSC-K/R (SEQ ID NO:15) and any combination thereof.

10. The FIX variant of claim 1, comprising 1-5 additional glycosylation sites.

11. A vector comprising a nucleotide sequence encoding the FIX variant of claim 1.

12. A transformed cell comprising the vector of claim 11.

13. A transgenic animal comprising the FIX variant of claim 1.

14. The FIX variant of claim 1, wherein at least one additional glycosylation site is outside of the activation peptide.

15. The FIX variant of claim 14, wherein the at least one additional glycosylation site corresponds to a site that is glycosylated in the native form of a non-human homolog of FIX.

16. The FIX variant of claim 15, wherein the non-human homolog is selected from the group consisting of dog, pig, cow, and mouse.

17. A method of increasing the number of glycosylation sites in a Factor IX protein comprising:
a) aligning a first FIX amino acid sequence and a second FIX amino acid sequence;
b) identifying a glycosylation site in the first FIX amino acid sequence that is not present in the second FIX amino acid sequence; and
c) modifying the second FIX amino acid sequence to introduce a glycosylation site corresponding to the glycosylation site identified in the first FIX amino acid sequence of step (b),
wherein modifying the second FIX amino acid sequence increases the number of glycosylation sites in the FIX protein.

18. The method of claim 17, wherein the first FIX amino acid sequence is from a non-human species and the second FIX amino acid sequence is human FIX.

19. The method of claim 17, wherein the glycosylation site in the first FIX amino acid sequence is in the activation peptide.

20. The method of claim 17, wherein the glycosylation site in the first FIX amino acid sequence is outside of the activation peptide.

21. The FIX variant of claim 1, which is a human FIX protein.

22. The FIX variant of claim 1, wherein the one or more additional glycosylation sites are introduced by insertion of additional amino acids, deletion of amino acids, substitution of amino acids and/or rearrangement of amino acids, in any combination.

23. The FIX variant of claim 1, wherein the one or more additional glycosylation sites are introduced by site-directed mutagenesis.

24. The FIX variant of claim 1, wherein the one or more additional glycosylation sites are introduced by chemical synthesis of the FIX variant.

25. An isolated FIX variant comprising one or more additional sugar chains as compared to wild type FIX.

26. The isolated FIX variant of claim 25, wherein said one or more additional sugar chains are added to the FIX protein by chemical and/or enzymatic methods.
